United States Patent Application Publication US 2025/0235397 A1 - sequence listing, part 3

SEQ ID NO: 10 - DNA, 8974746 bp, Bacillus subtilis (residues 3,589,901-5,384,850 of 8,974,746)
  source 1..8974746: mol_type = genomic DNA
ggcgaagttatcattaataatggggaaaagttttattataattacgttgataaagaaggatatgtaggtcactgtcatgtaaacgcacttgatttgaaaaactatcctgacagtctaattgttgagattaaatcaaaataaaattgaagttttaatcaaatacaaatgaataatcaatccagaaataagggaaattaactaaaaaaattgtgaggaattttcaatgaaacgatttattttagttttatcctttttaagtattattgttgcctatcccattcaaacaaacgccagtccaatgccttgcagtgtaatactggagccggtagataaaaatcttaaaaatgctaaaggtgtagcattaatctataaggtgcaattgaacccaccgagtgctgccagaaccaatataagtattcttgctgtccatcttcctgcaccttcttcttttggaaattacgacagttacgaaggatttgctactaaaccaggtgagattagttggcggtttaaactttatcctactcctgaggaagagagtcctagttgggcgggaagaattgacacaatttcggccgaaatgaagaatgttaaagtgcaagtgcgtctgtcaaattctagcacacaaaagttggggccaagtatattaacgaaaaatattgagtcctgttattgaatgtcttggggcaacagtgtaaaacaaacttggattggattgatgtaaatgattaaatcgattattttacctgaagaaaacacaaaaataactgtaggtaaaccgataaatgatgaatcaaatacaaaggtaattgctatttatgactatagagaagaaccagaagaagctttctgggtacacttatcaaatgggaatgatctatttgtagataaccatgaagtcattgttgagtatgaataggtctgttaataatggttgaataaaaagactgttttaaagaaagggtgagaaccgatagtcaatttcaaaaaacttagtgatccagaatatattaagcagatggaaattgagagaaatgaacgtgagcggatatatcaagaaaaggagtctataagaaagaaaactgtgtgcttcactggtcataggccgaacaaattgggtggatacgatatgaaaaatccaacaatgcttaaactcaaagataagctgcttgcagtaattgaagaattaatcactaaggaaaacaagtataggtttataactggaggagcgttaggaactgatcaggctgcttgttggtgtgtgcatattctaaagaagaaacaccctcatatcaaaaacataattgccacacctttcaaagaacaagataaagtttggtctgcagaccaaaaaatgtggtacaaacgtatgcttaatgtagcagatgagattattaatgttgaagaattagataaatataaagttagtggagagaaaccaggagagttttcgccagctaagatgcaaaagcgaaatgaatacatgattgatcacagtgaggcaatagtagctgtttatgatggaagtaaaagtggtacaagaaactgcttaaattacgccaagaaaacttacttaggacatcagctatggagacttcatcctgattttaattttgaattagatattacgtattttgttggatgataaggagaggtgaacttttctgaaactaatagaagaaagaacatatgaagaacgattgtacatatattctgatgatattgaagccagaaagcatttcgtaagtgaattaaaaccaaaagggtggatggtggacaattgctgggttgggattgatctaaatcaaataaaacagttttatcgattcaagagggaattaactgatgattatgtgtttaacagatagactaaagagcagggggcaattaatataggtgaaaaattaattgatagtaaaaagcataaaataataaacggatattatcacaagaattgtataagttgtaaaagctggttaccggcaactgaagagaatttttactctgtgaagaaaaataaggatggacttcattcatactgtaaagcttgtgtattaaaaaaggctaaagaaagcatgttgaagaattatgacaaacagcttgaacgaatgagggaaagaaatcttcttccagggatgaaagaggccaaaaagaaatacaactcaagtttgaaaaagaaaaaaacacaacaaatctggcaagaaaagaacaagctaaaattaaaaaactaccgtttacaaagagatgctcacaagaaacataacattacagatgtacagtggcaaaagtgcaaagactattttaacaacaagtgttcctattgcgggctgaaaattgaagatcataagatattattcaaaggaacctatatacaaagtgattttcataaagagcatgtagatcacaaaggggctaatgatataagcaactgcatacctgcttgtaaatcttgcaatagctcaaagcacgactttgcatttgaagagtggtacaactcatcaaacaaaaacttttcatccgaaagattactaaagatcaaagagtggctaaatcgttttaaagaggaacgacaagattcagaatggaggacaaaaggataggctgcaacaaatacataattgatactgtaatgatacttgcacaagtaaatagaggggaatttgaaaacattgagcgcaaaaaatctcctaaaaatgaaagaggggggaacaccccctcgataaatcaataatttgcttggtacttccctacataccatccatctttatattcaatgccttttaagtaccagtttctaccgttttcgtctttctcaatatttttaaaatcattaatattgtgatggtaaatatactttgtatgcaattctttcacacttatttcgtcttgaacaatgttattctctttaaccatagcagatgggctagtagcgaatgcaggagaagcagaaacgagtaatccaagagataaaacagaaccagtcaatacttttcttaatttcatttgaaccatctccatttccttttaatgtattgcaattacattatatggtttttaaagaaggcaaaatagcgaaattactcccatacatatggaaattgtgtgtcggttaatgtcgtgatagatgagaaggcaaatggagagatggattataggatggaatcataaaaaactatagaataaaaataaaataagtggaggttatgttggtgataaagaggaatctgcttagcaaccacgttgatgagattatcggagaatattacgctgctaaaggatattcagtccatagcattgaccgccaggaaaatggacaactaatcgttgttacggagcgagtagcagaggagaaggaaaatgcaaaagttgatatagcatttgattttgtacatagaagaccacataagaagaagtatttagcataaaaaaggcaaagaggaattaacactctttaccgttaggtttcttttttagacgatcacagataaatttcattatactgatagctattgcaacagatccaattattaatgtgatttggaggatgaatattactccgaaatttatattcacattgtcaaataagtcactcgaaaaggaaagaagcttatgaatacccaaggcaagtacgaaaaaggtgaggcatattacgacaagggatgctttggaataatctttagcgtggtcaaaattataaattgctattgatacaaataataaacccgtagcgatcttgtgggatagcgaatcattcgccgaaaatgattgcactactatgcttaagaaaaatccagtaataccgattgttttactcaaggaatcacctactcttatgtaagttaagtatgagtttaccaattaaaggggattttctcaagatgatacacattaaagttaaattaaaatcgtgatttaaaggagcggagataatgaacacttatgtagtcgatgacagcaagtataaatgtatttatgcgggaactgagaaagcagctgcttttaataatgaatttgaaaacggaacaagagtaagggtttggtttgaaggccatcacataaaaacgtttgagaaagaacaaagagaagtctgtggagtaggagaatggatcgttaagtatgatgctgctactgaattgcaaaaggaagtaaatcgtttggaaaagacctatttcaagaagaaagagttgttagacactattagacaagctgatggggtcggaagggaaatcaatgaaaaaaagaaatcaatactcaattacagtggatgttaatggaggagaatataatcaggagtttgttattttagcggattcgctaagtaaagttgggcgagataagataattgctgatggtgtgacaattcaatttaatgaccagattcttgaattgaatagtaataaagaagattcgaatgattattataagggtcaaacattaactgttaaagaagattgcctaaataacttctggaaaggcggaaccgttactgttgaagatgtagatatacatagaggcatattgatagacggtgtcgtttacttagaaaaacaagtggtagacaagtatttttcaaaagaagaggaatgacatgtacaggaagattttcgatatggttaacggtagtgaagagcaatcaaaaataactgattggctatataaattaatgattgaggatgaaaattcactttacaaaatcgacattaaagtttcgaaaaggaggatttctgaacaaggagatatttatagagaggagggagaatacatagagaacgcagatcttcaaactttaccaatcgggacaaaatcctttgtgcaaaacggttgttggaagggtgaaattgtttctaatgaaaagaaacatttatatatgccacagattggagagatgagggaaatcaaagttggatcaactgggttgaatatagagattgaataaaagatagtttttaactaaacatattaggatggatcgttatcgaaaaagcacacgtatcgataacgatcataaagtattaatttctatgccggcgtttttcttcgaagtgatcaggataattctgtttagatttcgatttgaacacaaaataaagtcctgcaattaagatgtagtccatgattttgtcaaatgaccaattcacgaaacaatctaagattaattccatttatttcacctccgagacaaaaatgtccagtctcttttatatggcaagcgtatgacaacctgcttgcagtaataaaggtgaaatgaagcttggaaatttaaaaaggtttaaagaaaaatagcatttaaaataaaatatttattttaatggaaggaggtaaccgtagtgccaaatcaagagcaaataaaacgcatgaacgatattaatgatctgataaagcttattgcaagcattgatcatcgtacattctaccgcaagtcaaaggatcgtatagcgtatttcaggtttaagaaaaaactgttcttcgttgatgattacacgggtgatgacgtttatccgtatgaaatgggatacgggagtccaaacggcttttcgcatggaggcaacatgtggcaactggtcaacagttttagaaagttcatcataacagggaaatgcggcgagctgagggattataaagaaatatgggcttacagctatgaaggatgtatgaaaatccgtcagaaggcaaaagaaatagggtttatagagactgttgattatccttatagcttcgatgaatggatgaatactaattgatccatgtactaaattttcattgaattttaaaaggctaggctctaagaagttatgtaacggagagattacactctccaggattcaaaggaaggtatgcggagtttaccgtgcttagtcttaaatctgtgcttaacgttacataagataggttcgataaatacatattcatcagattcagacttaacttgtttcatagagtggaacttagttcgttctgcatgtggcataaattccataaatccagctgaagttccatcaggataagacagaaggaattttatatcctttttggtgtagccagttatgagaacctcagtgtaatcgtaattaatcactttaagccaattatgcgaacgtttattgatctcataaggggagttagctttcttgattacgattccctctaaattcttttctttggccaggttgaagtaagcaagaccgttaccttgagttccctctataacaaagacattaggatgatccagttcaagtgaattcagaactgtcttacgctcagtgagtggcttagctgcaattgattgaccgtctttgtagataacatcaaagacacagtaaacaatattatgagctgattttttggacataaaacgttccattacagcctcaaagtcaggagcaccacctgaggcagctacaataacttcaccatcgagcactgttccatctggaatatctaagtccatgagttctgggaacttacttgttacttcgttgttgtgacgagtgtatagcttaatctgattatcaaatttagaaaggatgagtctgattccatcaaatttgagctcagtgatatagttctcgtcgttaaaaggctcttttattgaatgcaatagcattggcgatacaaacaaaatatcacctcctacttagaacatattagctaagcgaaggtgatatataaagcgatatggcagtggtacttaatgggattcaatgagctcaggtgaattgtttttaggtgaattcactaaagatgaaacctggtatgcttccatgtcatcagcatcatatggctgcagtaagctttgtagataatcaggatcagtatttttagggttgagccattccttttcgttctcatcagtaaggataaccggcatccgatcatggatgtcttccataagctcattaggctttgttgtaatgattgtgcaagtgtataaaggattgccttctggtgtgttccacttttcgtataagcctgcaaaagcgaagagattggacgatttaagtttaatccgcataggaatcttagtctttggatcaaggcgtttccattcataaaaactgtcagccggtatgatacaacgtttgcttacgagcggctttcgaaagctgggtttctcggacaatgtttcagcacgggcattaatcattttatagccgatcttttcgtctttagcccatggagggataagaccccatctaagtttgcccagacggttattggatccatcgttgatgattgtcaggatgttttgtgaaggagcgacattatagctagggtgatattcaccttcaggtaagaattgatctatattgaattgctcaatgatgtcatcaaactcagaaaataaagtgaacctgccacacatgttcatcatcctttagggtttttgaatattgtacaggcttgatacacgaaaatcaaaaaggaggaatgtgatgccgcagcaaacagttgaggttaaagaagttgatgtgttgattaggggaatatggagaaagaaaaagttcaccgatattcaaaaggggcaaacctttaagattgaggagaacggaagaacaaagaaatacatagcgagaacagatccttattgggatgacatgtttgaaacttacattattgatttgttggataaaaataaaattagaagaaataagtaaacagaaatctagataaaaacgatattttaaccagaatccagggaggtaattgaaatgaacttatatgaaattatgttagagcactttgcacccaagggaagtgagcggggtatctttacatatttgcttgctcaatctgatgaagaggtatatgaatggttgaaaactgatccgagcttgtctgacggcagggcagtctataccccatatcaagacaacgaagcaaacggtaaaacatatgcaatttataatcagagctttgatattgttggtcatgaaaaatataaagatcgaatgattcgattaaaaggtgagttgaatgatgaagttgaactaaccgatctttattacggaatgaccttagtcgggtggagtatggtgaaatcggatattccatcggaacaaattgaattgttaaaagatactggcatcagtattgagtctgcataaaagtaattttttattcggagaagggggtggtactaatgtgattgcttataagatgaaagtaaaaaataaaaataaacctatttaaggagagttgttgattgttaaagtttaaaaacagaatagtagaaaaaagagttaagggggcagagaaggcaagctttggcgggccagtccttctctaccgcacacttcgcaaggttacgaagctatataagtatatcacagacaagaagtcttttccaatcctagttacttcattgtttgcattgtttaatcccaattcagttctagctgcagataagtatagtaattttgaagagttgaaagaaaatgagtcacctttgagctataacattctaactaccgatgttgacaggagagtgcttattctggcaccccatggtggaggtattgaaggagggactagtgagcttgcaagagaattaagtaagtcttactctgcctatctatttgaaggtttaaggataccaggagcttctgagttgcatattacaagtacgaatttcgatgaacctcaagctttagatttattgagtaagcatgatttaacaatctcaattcatgggtatgcatcaagtaagaaacacactttagttggtgggacagacagagaaaaagcagcaaagatcacatcattacttaccgatgcaggcttttctgcagaattactgtctgaagattcccgtttagcaggcacaaatgagcagaacattgctaataaaaatagcactggtatgagtattcaacttgaaataagcactgaacaacgaagagaaatgtttaatacttttacactggctggacgcaatggaacgcagaatcaagttttttatgactatattgctgttctaactaaattcattaatgaaaatgtgtattgtatggctggtgtagcaccatgacattgttgaataaatccatacgatactatgttgactttgatcagtggggaataaatgcatttaactcgaatccaattgaaacaactaaaggatttaatgaagctcttatatatgcatcagagaacaactttcctattgttgaagttccaaaagggaattttattattgattcagtaaatacattaaatcaacgaaatcctgaaattggtgggggaattaaaatcccatcaaatatggagctccttttggatccagaagcagtgtttcaagttaaccctaatgggtatcagggctattcttgtttttatattgggcttgcagagaacgtaataattagaggaggtcgtattataggtgaccggtatcaacatgattattctctaattgataccgatagaaaaacacatgaatggggatttggaatacatgttcatggaagcaaaaatgttttgattgaaaatgtacaaatctcagattgtattggagacaacatttggattgcagctcacggaatgatgaattacccagggatggtttatacgccttccaaaagtgttaccgtaagaaaatgcgaactaaaaagagggagacggaacaatttagctactaacggttgtgaaggattattggttgaagactgtgatatagaggaagctggaggagatacaattggccctcaactaggtattgatttagagggctacggagaaaacggaagaaagtatgatcatccttatgagttaacgatatcggattgcaggtttagaaaaaatggtcgtggttcggttactgctcatacaagcggtaaagtttccatcaaagataactactgtgacaatgttatttcatatggctacagtacagatgtgagtattaagggtaacaagataataaatgaaggggggtctaaagagtacggaatagactctgtaggtgtttcgagcactgagactggcaacagaattcaaataactgataacaatattcaagggtttaaaataggcatgatgattagagggaaaggggtatcgattgataataataccgtaaagaacgcttcaaattgtgcaatagcaacacatatggccgaagatgtttccatttcaaacaacagaatacaggacagcgattgtattcagatccaggtgagaaattcatcagatattaaagtaagcaataataaagggaaaggtacaacttcagcatatgcaattaaagtgatggattcgaatgacgttaaattcttaaataatacgttctccaatctttacggaggtctatattgtgagagatctcaggcagtcagaattaagctaaacgatttcttattgagtggaaaaggttacgggatatattgggataaagattcagaagtcttcctaacaaggaatgagatatttgaaccaagaaatgttgcaattatgggggcagctgatatgtacaatatcagaataagtgataaccagatctataattgcaaagcaatcattgcgatccacttaataggcggttctgagcatatggttagaggaaatgaaattatgtttaacagagattcagatcaaggctatggaatatatttaaacgggacaaaaaaggttcgattaataaggaatgatgttcaaggtattggtgcaagagtgctttcgcatccatttgcaacgtttaatgcttccagtacaactttaatacataatacatacgacagcggcacacctagattagccttagatgatacagtaatcgattataaataaaaaattcttaacgagaacacttgttccctttatgggttttggtatataatttagtagtaccaaaaatttcaaaacaggggatgagagtatgagtgagcagaagcttagaatcggagaaatacggtatgaggttttcgatgattatgatccattaacagaggagtatttaggaaagaacctagcaaatgcttattttattgctcaaattaaaaaggaaaatgtagttcaagtagggaataggaaaattaattactcaagcgatgttaaaattggttttgatgcattcggggaagaaactaaagagaaaatcaaagagtatcttctggctgcctatagtctaatagcagaaggggctaaagacgatggtctagtagaatatttataaggcaatgctgggctagtctctaagattagcctagttatcatacgaataaaggggttaactgaatgtcaaacatcatttctaaagagcaagatgaagcaattaaatactttagaaacaaattaaatttatcagacaaagacttatacataccgttgattaattttgaactacttagagacaagaacgagcaatatgcgaacattctttatgagctgtataaaaatgatccctatttgtttattagagctttaaaggaaggttatgtggttaatcagccaattgcatttgatgaggccattgtgcgattctttaatggagaagaactggctattgtacataaaacaacaggcagaagatacaatgtaaatgtgaaaatgaagcagctgcctgatggcttttcattgcaaacaatggatatgtggttgtggagtgagcttgtttgaaaatagcaaactctttacctatataatgaaaatatgatagaatatagaagaaattgataattgaggagatgtttttgtggagtttaaagttggacaagacgtatcagaaatttggaatatccatggatcaattcttccggaagttttaatgtatatgttccctcgttcagacgaatcttatgattgggaatttgtaaatgacaacggaagacatatctttactgcctggagaaaaagtgaacctattcctacattagaggaaattgaaaaagcagcaattgagcttgaagagaagaaaaatgcacctaagccaaaaactctcgaagaaagagttgctgatttagaaaaacaagtagcttacttaacgagtaaggttgaaggaacaaactaacaagagtcccttattggggcttttaaatttaaataaaatgataattttattcgaattaaaaagagcgcaaatgaaatacaaaaataaaaaatataaaagtttataaaacatgtagacaaagataaaaaatatgtatataataaaatcgagttaaagggaaggaggcgaattacttggaggtacttgggataacagagaaagcgttaaactattacagagaaaacgttaaagacaacaagaccattactcctgatcaggcactgttaaagatgataaggaatgtcctacttgtcaaagaaactcatcctgagcgagtgaaaaaacgtttattttgcacagagtacgcttacggaaatatgataatcaaagttaacagaaaaaagcaggtatttgaaattgtaaataaatcaggatgcttttctgaccaaaatgattggaagttcccaaaaagaaggtacatagaacttagtaaagaacttggaatcaaagactgcaagtttagaaaaattacatattcaaagaaaaatcacaataaacaaaaataaaaatagaggatgattaaaaatatgacagaaaacaaaacggtattacgtgaagcatcaaacgttgtaacaattgaaggaactttagctgaagtacgacacactgaatggaaaaatggaaatggactaaatattgaattagacattgaggttgcacctaacgaagtacatacagttaaaggcttttccaagtataagaaagatgatggtactgataatgcagttgcaaaggggtaccagactattgtaagcgagtataagtcaatcgcaaaacacggtagagatgaagctgacaaagtaagaattactcaaggtaaaattagcttaaatgagtattattcacacgggatttttaaatcatatccacaattaatggctaactttgtgaacagactggatgctaatgaagaattcaatcccagagcagaatttgatgttgaggtgtttgtaaagaacgtaaccgaagaaaaagtaaaaggggaagaaacaggtagagttaatttaaatggctatattcctgtgtacaacggaaaagtaattccttttacatttgtagtcacaaaagaaggctcacaatatgttgaaaataattatgaaaagggaactaccgttaacgtttttgggaagatcattaattataaagaacaaaaagtaacaaccaaagtagcggcatttggagaagataagaaagaaattacttcaattacaagaagagagtatctaattacaggtggtaatgatccttatgatgaggatagtaagaatgcttttaatgcagatgcaattaaaaaagcgttgactgaaagagagatttatctagacgagcttaagaaagaaggaaataaagaaaacaataaaaagtctgggtttggtggaagtgctcctaataacaagccttcaaagccggttgaaatttcagatgatgatctccctttctaaaataaaatagatcattaatctaatacataactggggtgagctccgactcacctaacaaattcaaaataaaaggagaactgaaatggcaatcgatattttcaacccacaagtttctgtagtagcaaaaggattagaaggaaaagttatcacaatctacggttctaacaacttaggtaaaactaagcaaagcactcggatgaagaaaccgttatatctgccattcgaaaaaggattaaatgctattgccggtgtccaattcatgcctatcaatagttgggctgattttaaaaaggtaaacaagcagttaaccaaaaatgctgaaaaggccaaagagatgtatcaaacaatcattgttgatgaagtagacgcttttgctaaatatgcgactagatatgtctgcgagcaatatgatgtagaacggattaaagatggtaatgatgggtttggcctttggaaagagtatgaaactgaagtatgggaagaaatcaataaattaattggcgtaggatttacggttatctttattgctcatgctgctgaagacaaaaaaggcaaagtatatccgaagggggataaacgagttttagctccagtaattgataacagcgatattgttctctatctaagttctaatggtgttgatgaagatagaaaagtaatcaaatcaagtgcttggttagctgaaactgaagagcattttgctcgtagccgatttgattacattgacacgtatcttcctgaatttactgcagaaaacttagaaaaagcaattattgaggcagtcgaaagacaggagcaagcagaaggaattgttgctgttacatacgaagagcaaaaacaaaacaacgcttcagaagaacttgatttcaactcattaatggatcaaattaaagaaattggcatgaagcttaatgaagaaggccgtttagaagaagttaatgagattacagagaaacatttaggtaagggtgtaaaagttactgagtgcagccgtaagcaagtaggtgtcatgtctgtaattctagatgatctaaaagaccttctagcagaataaaagaggagagattattctctcctccttattaggagtgattatttggggagacaagttaaatgtccttattgcgagaccaagttagacaaagactcagccattccttataaaaaaagatattaccatgaaaagtgttttaatacctggaagcaagaatcagatcacagaaaagagttaattcaatacatatgcaatttatatggtcttacatctccaactggcatgatgttgaaacaaattaaagagtttcaagaggaatatgggtataagcttaaaggcattgaactagcgcttaggtacttttatgaaactttggataatcaacccagagaaggtgatggcattggaatcgttccatttgtttatgatgaagcaaagcggcattacattagacaaaaagccatccgaaaatcagctgaagatccaaagaatcataaaagagaagaaattactttggtcataaaaaaaggaatgagaaagaaaagagggctagttgatatctcaatgctataggaaggagagtccatttgctacaagacaaacaggcaataattcaagttttagggagcattttaaaagatcccacaatcttgtcagagagcaataaatataagataacttcggatgattttccttcaaggtttcattcaatattattttttgccatgagcaacctatttcatcaaggaactgaagtattgaatgacgttgaaatagatggatatctaaaggattacgatattcaatataaaattttccatgataataagggtcttgaatatatagaaaaaatacaagagttggcagttgtcgaaaactttgattaccactataaaagattaaaaaagtttagtctgcttagagaaatggatggcttgggattcgatattaaggaaatatatgatgaatctctgattgacccaaaagaacaagaaaagatgcaagaacagtttgataagaagtcgattgatgaaattttgacagcttatgaaatgaagattgtagacataaaagaaaaattcagaacttcatctgaaagtgtgggaatccagggtggagaaggtattaatgaattattggattcattcgaagagtcgccggatattggagttccattaaatagcgaaatgcttacttcaatttttcggggatcacggaagaaaaagttctatctgcgctcaagtattacaggtggcggtaaaacaagaaacatggtcgctgacgcttgtcgcttaagtgcaactgaactttatgatcctaaaaagaaggaatgggtatcaaacccatggagtgaaagttctacagttatttcaacagaaatgatggccgaagaattgcaaagtttagcacttgcctacattagtagtgtagaagagaaaaaaatccttagaaacacaatcaatgaaaaagaaaaacaacttgttcgtaaggctgctaaggttcttcaagagtctaacatatggttcgaacatctgcctgattttaatattcaggagattgaaagaacaattgaaaagaacgtcattaaaaacaatgtagagtacgtttatttcgattatattcactcatcagtaaccattttttcagagatgagcaaaaaaagcggtgtcaacttgagggaagaccaaattcttttacttatgtcagataagttaaaaggcttatgtaacaaatacgatgtctatatgatgagtgcaactcagctaaatggtgattggaaagaagcatggttaaaaggacaagtaatagatgcttcttacttgagaggaagtaaggccatcgcagataaaacagatgctgcaatgataattcttcctttaagtaaaaaagagaaggatgcaattgatccaattttaaaagaaggattttatccagagccaaattttgttacacatgtatttaaaaataggggaaatgagtatgacaaagttaaagtcttctcccatatcaatatgggcaacatgcggataaaggactgtttcacaacaaatcttgacaatgaactaatcacagttgagaaattgaatataaaagcaggatgaggggtgtagcgccctttgaagtatgataaagacagagtaaaagaaagcctaaccattgaggatatacataagattttaaaagatttaggtagcgagaacaatctgtgggatcaacaaggaaatccaatttacagaaccgtttgtcacaatgcttctggtgggagctataagctgtattactatcatgaagcaaaacagtttcactgttatacagagtgtggggataattttgatgtattcgaacttgttataagagcaaaaagccaaaaaggaattaatatctcttttaatcaggctatcgaatatgttgccaaaatagcaggaagaacatttggatttgggaatagagagacatacataaacaatgatttgattgatgactgggaatggatggggaagttcaaaaagaagaaaaaaatacatattgagctccccagctttaatgaaacggttctagatgtatttgtgccttatcctcaccaattgtggctaggtgagggaataagtcacaagacattaaaagagtttgagattgggtattattttagacctcatacagaagggattaccattcctcatcgagatttaaataataggttgattggtatacgtaggcgctcaatgattaaagaagaagttgatgcaggctataaatatatgcctttaaaagtaggcaatatcttatataaccatcaaacaatgatgaatctatatggattacataaaacaaaaaattcgatagaaaggttcaagaaagtattgattttcgaatcagaaaaatcagtattaaaatgccaagacttttacggtgaatcaaacttcacctgtgctgtttgttcaagtaatatttctaattttcaccgtgacattttattgtctcttggtgttgaagaagtttttattgctcttgataaatatcgaccaccaaaagaacatgaaacagaggagaaatatcaagaaaaactggttgaatatcagaagaaaattctaaagctcgcagcaaaatttactccttatgttcgtgtatatgttttgtgggattatgaaggcttactggattataaggacagcccagcggacaagggaaaggaaactctagaggagctaatgagaaggaaaattgagattggcacagatgaagggggaatttaatggagtatagactaattggcgacaatgattataatttcgatcctttagctactatcttaaaaaatagaggcatagaagatccaaagttgtttgttaatgttgatcaaagttcagttattcattattcaaagcttaataatattgataaagctgcagattgtcttatcaggcatttaaataataaaaataaattgtttgttcaggtagacagtgatgttgatggatacacatccagctcaatcattataaattacataaagaagatttgtccgaaagctaatatacactacagaattcaagatgggaaagagcatgggatttttattgatacaattcctgatgatgttgacttagtcataatcccagatgcaggttcaagtcaatttgaggaacatgaggctcttaataagagaggcacagaaataattgttattgatcaccatgaatgtgaacgagtgtctgaacatgcgatcgtagtaaataatcaactttcgcctaattattcgaataaaactctgacaggtgcaggaatggcctataaattttgccaggcaattgatgaaaagctaaataaaaatgaagccgaacaattcttagaccttgtatctattggtaacattgctgattcggctgattcaagaaaccttgaaaccaggtattttatgaatgaaggcttgaagaaaataaaacatccattattaaagaagctgtttaagaagcaagagttttcaaccaagggtgacaagagcatacagaatacacagttctttattaaccctttaattaacgctgccattagggttggaagcagtgaagaaaaagatcaaatgatgagagcattcctcctttctaaagaaaaggttccctacaaaaaacgtgggcaaagtgaaactgagcttgtatcaatacatgaagacacagttaggattctaggaaatctaaaagcaaagcagaaacggattgtagatgcagctggagtggaaattaaaaatagaatagaagagaaaagtttaacagcgaataaagtactcattgtttacattgaaggaattctagataaaagcctaactggactggtggccaatcagcttgcagaagaatataaaaagccggtcttgttagccagaaacgatcccgaaaaaggtaaagatatcttgagtggctctatacgaggatatgataaagggtttataaaggattttaagaaagagcttatagatactggattatttgagtttgttgaaggtcacccaaatgcagcgggctttgcaattaaacgacagaacttaatcctggtgaacaaagtgctgaatgaaaaatttaaagacataaatatcgaagaagatattcagaatgttgattttgagatcccagcaaaacgattgagaaaagaatttatccttcaacttgatggttacaaagactattggggttacaaagttgaagaacccttaatagctataacggatcttgaaattgaagtcgaacaaattgagcatttagggaaaaagaataagacaactgttaaatttaagcatggcgatattgaatacataaggtttaaaagtgatgagaattactttaatcagcttactgcatcaaatggaacgttagtcattaatgtaattggcaaagcaaaggcaaatgaatacaaaggcaagaaaacacctcaaatcgagatttatgaattggaggtggttcgcacaaaacaaaaagaacttgtgttttaagggggagaaaagttgataggatgtcactgtcacacagataggagtaacataaggcttctagactcaacaaactcagttaaagaactgctcaaaactgcagtaaagatggaatataagggattggccataacagaccatgaagtcctctcagcacatttagatgctattcgaacagttagagaaatgaaaaagaagggggatatgccagaagattttaaactgatattgggcaatgaagcgtacctagtcgattctttagaggaagttcgagataactataaatcgggagtgacaaaatttccgcatttcttgatgttggcaatggatccaaaaggacatgagcagttaagaatactgtcttctcaagcctgggaaaactcattttatacaggaacaatggaaagagtgccgacagtaaaaaaggatgtagaggagctattaagtaaagatccaggccacatcattgctaccacagcttgcttggggtctgaggtaaacattcacctgttaaagataaaggcttttgaagaaactggtgattctcagtcaattaagcagcacaaactaaagattcatgagtttataacttggtgtatagaggtttttgggaaggataagttttttatcgagcttcaacctgcactgagtgaagaacagatttactgtaacaagaagctgatagatatagccaacgggtatgacttgcaaatgattgttacaacagatgctcactatctaagaccagaagatagagcaattcatcaagcctttttaaacgctaaggatggagaaagagaagttgattccttttatgaagcctgtttcgttcaaaacgttgatgaaattcacgagagaatggactacattgataaagaagtcatcgatcaggccataaaaaatacaatgctcattggtgagatgattgaagactatactatagagcacgaaccaattatccctaagatggagcttcctaactttaaattaagacatttatttaaaccagcatatgatcaatatgaatatataaaaaagatgtctgaatcagcagatgaacaagatagatatctccttaagttaattgaggacggatttgaagagaaattaaaaacaagcgaactaacgagagaagcttttcataaaatattgaacaggattaacgttgaactgggtgaactttgggaaatcagccaaaagctgaatcagtctatgtcttcttattacataacagttagagaaatcattaatattatttgggatgatgagtgtggaggagatagtttagttggggcagccaggggaagtgctgcaggttacttagttaattatctactcgacaatactcaaattaatccaatgcaatatgatttaccacattggagacatatacataaatcgagacctgacctaccagatatcgatattgatactgaaggatcaaaaagacaaaaaattcttaaggcactaagagaaaggtttggagacaagcgtgttcttcaaattgctacttttggaactgagggttcaaaatcagcgcttcagacagcatgtagaggcttaggaatcgataatgatatatcccagtatttaagtggaatgattccatttgaaagaggatctaactggcctttgaagcattgtttttatggtgacaaagaaactggcaggaagccaattaaagagtttattagggaggttgaacaataccctaatcttaaagaaacagctttaaaaattgaagggttaactaataagcgctcttctcatgcagccggagtaattatctttaacgatgaatatacaaagtcgaatgcaatgatgaaaactcctaaaggagcttatattacacagtttaatatgggtgacagtgaagccatgggctcagtaaagtttgaccttcttacaattgaagctttagataagattagagtaacattagaccaattaatcgagaataatgaaattgaatggcaaggaagcttgaaggaaacatacaacaaatacatccatccagacgtaattgagtatgaagatgataagctatgggaaatggctggtaatggggaaatcatggatttattccagttctcaactgaagtcggtcatcaatcagttgtcaaagtaaaacctaagaacttacttgaagcagcagtaaccaattctttaatgaggcttatgtcagacggtgaagaacagcctgtagatacatatgttaaatacaaaaataaccttaataaatggtatgaagaaatgacacggtacggtctaagcgaaaaggaaatcagagtaatggagaggcaccttaaggacatttatggtgttgctgatactcaagaagtggttatgcagatggttatggataaagatatagctaactttgacattaaagaatcaaattatcttaggaaatccatagcaaaaaagaaagaagatgtactaaaagaagtggaagaattgttttttaaaaaaggaaaggagattggcacttctgataacctgttgaattatgtctggaatgttcaatttaaaagacagtttggctacagttttagtttacttcataccttggcatattcaattattgcattacaggaattgaacttaaactatcgatataatcctttatactggaatactgcttgtttaacggtaaacagcggaggaatagataccgaggatacaaaagacaacaaaaagacagctgctacaaactacggaaaagttgcttcagccatcggaaacattagacaaagagggattaaaatagacctcccagatataaataaggctgattttggttttaggactgatattaacaacaattcaattttatttggacttaaaggaatgaatggaattggagacgatgttattcatcatatagttctaaatagaccatatagtgactttaacgactttattgaaagaatgtttaagagcggcattattaagaaaggacaagtaatccaattaataaaaggaggctgctttgattcttttggaaacaggcaagaaatcatgaaggcctttattagcttaatatcagaaccaaaaagtaagcttacgttgtctaatttaaaaatgctaattgaaaacaacattgttccttcagaatttgcacaagaagtgagattctttcgttttaaagattacatcagcaaaaaggtgtacaaaacattaaagtcgccaaaagataaactttttttattggacgatgtatcagcttcgttttataaccagcatttcagtgaggatagtgtagttgacatgttaaacgggcagcttgtcatttctgaaaaagcttttaaaaaagaatatgataacaagatgtctaatataaagtcctggataacaacagaagaaccactgaagaaattgaatgattgtttattaataaaagagtgggaaaaatacgccgatgggtcattaggaaagtgggaaatggattcattgagctattattataatgaccatgagctttctggtgtaaactttgccaagtatgatattgctgacttttataaactgccagcagagccggtcaaaggtaaaccttatcaatggagagggaaaactctctatgaatatgagactacacggattataggcactgttttagatagggataaaaacaaacatgcaattactcttctaacacctacaggggtggttacagttaaacagtggtcgggcagctttagtcattacaataaacagatttctagatcaattggtggcggaaagaaagaggtaatcgagaaatcttggtataccagaggaacattgctcatgtttactggtttcagaagaggtaacaattttattccgaaggtctataaagatagcatatataatcacacagtctgcagaatagattttgttgataatgaaggaagtatgagtttgacaactaaaagggcagaaatataaatcttaactgatataggagagataaaaattttcaaaaaacttatagacaaacataaaaaatatgtatatcatagaattaacaaaatggcactttttgctacaattggtttgttaggagtagggctcgtatatagcgctaaaaacttgtatacacatcaagataatcaagtctcaataaaaaagtcattttatttaaataaaaaagaggtgaggcaaaaacttattcacgaaattgacgttccaagaatccttcctaggctaaagagtgaggaagaaaagcaggctgaaagtagaaaaaagtatcttaatgcgacaattacatatctaacagaagaaaataaaaaagcagcaaaacatacaaaaacaaaaaaagtgcaaaaaaccaatacaaagagaaatcttgataaagcagtttcaaaaagtacaaatgcaaaggcagtgaagagtcatgaagttgttgctactgcttatactgcgttttgctctacagggtgcacagggaaaacaagaaccggctacgatgtatcaaacacatcctattacaatggaaaaagaataattgctgttgatccagaagtaattcctttgtattcattagtgcaagtttcatatgaaggaaatagctttcaagcatatgcaatagatacaggaggggacattaaaaacaatcgtattgatattctaatggacagtgagcaagaagcaaatgcatttggtcgtaaaaatgtaagagtaagctggtaaatcgatccaaatgactgaaaggtataaacatttcaacaattcgttcgatgcaatacataacatgaaatttatcccaaggaaaactattacatagagagagtgaagaggatgttcattttggataaagaggctaaggtaaaatcaactggagagcgtgggattattgaagcgatctatcctgaaacagaaacagtagaactctgttattatgatggaacttatgatgaaagacgttttgatgatgttgttatggcaacaagcagttaaaatgcatgacaaaaataaaaaatagggtgagataattgaagtgtattcaaattgaaatgtcattcacagacgaatatggacaggtgaccagattaaataagacttataaaccgtcgattattgaagaacataaaggggaaatccctagattgttgctagatgattttaagaggttcttgtcgtcccttgggtttaatgaaaaacaggtttcgagaatagtaacagaagattaagaggttttttattgaggggaggtggtattaaattgcctaaatactggagttatcctgttggactagctgtagaaattaacaataatgcacgatatggatgcccacatcatgtggggagaaaaggaaagattatcgagcatttacattcagctacatatgactatgcagttagcgatgaaacaggtgacattacttactttaaagaacatgaattaacaccactaaagggaggtttagcttatgtttaaaaaaggtcaaaaggtaattgttgattttacagatgagattggagctgttgcgaaagttgattatcgatacaaccagatagaagtaaagtatcctgatggcacttaccaggttgttggatttcataaagtaaggaaggtggaggattaatgacattaattatcttggaggggcctgattgctgctttaaatcaacagttgcagcaaagctaagtaaagaactgaagtatccaattatcaaaggttcaagctttgagttggccaaaagcggaaatgagaagttatttgaacacttcaataaactagctgatgaagacaacgtgattattgacaggtttgtttattctaacttggtatatgcaaagaaattcaaagattactcgatccttacagagcgacagcttagatttattgaggataaaattaaagcaaaagcgaaggttgtatacttacacgctgatccaagcgttattaagaaaaggttgagggtacgtggagatgagtatatagagggaaaagacattgattcaattttagagttgtacagagaagttatgagcaatgcgggattacatacatattcatgggatactggacaatggtcaagtgacgaaattgctaaagacataatctttttagtggaataggggaatttatgaaaaaagtaattgcgattgacatggatcaggtcttagctgatttactaagtgattgggtagcttacattaacacatacgatgatccttttctcaaagagaaagacatcctatgttgggatataaaaaaatatacaaataccaacaataatgtttatagacatttagattacgatttgttcagaaatctaaatgttatagaaggtagccaaagagtgacaaaagagctgatgaagaaatatgaagtgtatgttgtgactacagcaacaaaccatccagattcccttaaagcaaagcttgaatggcttacagaatattttccatttattcctcatagcaatgttgtgctttgtggcaataaaaacataattaaagcagacatcatgatcgatgatggaatacataacttagaatcatttgaaggaatgaagatactatttgatgctccccataacaggaatgaaaatagatttattcgtgttatgaattgggaagagattgaacgaaaattactttaaaatatctcatttatccagaaaggagaaaacagtggaacgttttattaaaagactgtcagcttcttgtgagtcaacaattcatcacaaggtatatcaaattatgaacgaagcaaaaacagagtttgaaaaagtgctaaagaaattaaaataaaagatcaattttatttagagtaaaaataaaatatatggaggttgtttgttgagtaaactacgtgtaatgagcctttttagtggaattggtgcatttgaagctgcattaagaaacataggcgttgattatgaactgattggctttagtgaaatagataaatatgcaatcaaatcttattgtgcaattcataatgtaagtgaaacattgaatgttggagacataagtaaagctaagaaagataatattccatattttgatttgttaacaagtggatttccttgtcccactttttcagtagccggcggccgtgatggtatggaatataagtgtagcaattgttcgcacgagcatttaattacttatgaggattataagaagggagtcaaatgcccgaagtgtgaagctgtttctaaggctaaagatgaacggggaacgctcttttttgaaacagctttgttagcagaagagaagaagccgaaatttgtgatattagaaaatgtaaaagggctaattaatagtggcaatggacaagtgttaagaataattagtgagactatgaacaatataggctataggattgacctagagctacttaattcaaagtttttcaatgttccacagaatcgtgaacgggtatacataattggcattagagaagatttggttgaaaatgaacaatgggttgtaggtcagaagcgaaacgatgttctgagtaaaggtaaaaagagattgcaagaaataaatataaagagttttaattttaaatggcctttacaagacactgtcacaaagaggttgagagaaattcttgaggattttgttgatgagaagtattacttaaatgaagaaaagacgaagaaacttgttgagcaactaggaaccgcaccgctacaaaaacaagaagtaagggagccgttaatggtgggacacgtggatttaaaaggtcacgatgccatcaaaagagtttactcgcctgaaggactttcaccgacattaactacaatgggcggcggtcacagagaacctaaaatcgcagaaaagcagaaagaagtaagggcagtgttaacgccagaaagagaagagaaaagacagaatggaagacgttttaaagaaaacggagaaccggctttcacggttaatacaattgatcgacatggtgtagcaatcggagaatacccaaaatataaaattagaaagctctctccattagaatgttggagactccaagcatttgatgacgaagattttgaaaaagcttttgcagcaggaataagtaactcacaattatacaagcaagccggtaattcaattacagttagtgtgcttgagtctatatttcaagaattaatacatacatatgttaataaagaatctgaataaaatttgtcttttaaacaaatataaaataagaggagtggatcgattggatagttacccagagtccctaaaaaaagagacagaggagattaaagagcgtgttaggaatggaaatatcaaagaagacaagattaaagaaattgcagaaacgacagttgagtttttgaaatcagaggagaaaagacataaatacttttctgaagttgctgcagctatggctgataacttaagtgagtttttcaagtcgtatttaaaaggagagtgaatatgctaactgatcaagaaaaaattgacttggtaaacgctcttgattttgtagttattgaaccacatacacaaagcatttacgtacataacgatgaaaagactaatggagtattagctaaggttttgcacactatttcagtagatgagtatattgagagctttaagaaaggtagtctaattgatatctttccagcagcaatgcaagaagccggtgcggaaggatttaaagatggccagtttgtgattatgccaaagaaattttatgttgatcaatgttatgcgatgagtaaggaaatcgagcggttaactaacctaaacaatctacacaatattaaaccaaatacatatcaaggcttgattcattaaattgtttcgagaaaaaatgaaaggataaagggatgtttattgaaaaagtattatgtaaggtgtaaagacagcaaaggtgaaaatgcgtctctagttattgaggcgctatcacctgaacatgcaaaagaacaagcatacgaagtttatgaggtaggggatatttataatgtaagcctgggagaaggaaagtcgaagaattgcctagaccgaaaatattccccatacataaaaaatgacaatggaaaagcaataaccatattttcatagggagagggtatcattaaggatattgttagggatcttgtaattgatgatatagatgctgctgaaggagtattggataagctttatgtttatttagaaaacactttaaggcctgaagaaaagcgtgtttgggagcggtgtgataaagatataatgtctgtttttgcaaagctgaaaaatattaaagaaattatttaaaaaccgatagacaaaaacaaataatatgtatataataaatttacgttgaggcgaaggagagtgttaatgaatcatatatgtgacatctgtaaggagtacataagcggaaaaacaatttgtcttaggatcagcgatgaaaaaacttatgtagacttcaactgttgtgaaagttgtgcaaagggttattccgataaagtgaaaaatgaatgcagcaatttaagtgttaagaagacattagaacatttaggattaaatatcaaatacaaaataagaggataaaatattccttttatacaaatgtaaaaataaaaaacgccataagaagttttatggcgtctatcgaacagggaggtgattcaaaggctctggatttactctgagattagtataggaatgtagcaccaacaatgatcaataggatgaataacacaacgatcaagacgaagctgcttccgtatccgccgccagagtatccaccagaatatccgctgtagaatcccatattgccacctcctttagtaaggatagtatatggtatggcaaaggttaaaaattcgacatagatttcagtctaaaaaagaaaaaatgaagactttgtctaaatttaagagttgaataaggagagttgatgaatgaacatgtttgtaattgctgcaaagagtgaagggaaatatctctatggttaccacccacatatttactcaaatcttaaacaagcagaaaatgcattgaagacaatgagaaaaaacggaaagttaactgaaagagacaaggtatatggactagacggtctgatgttggtggatctataaaaaggaaagatatagatggggaaatatgatcaaaggaaatactaatgatttcccgggcaagcgcagtatacgacaaattaaaacaagcagaaagaaatattaggggagatgagagtatgcaaaccttagatgcaccgatttacgaagttaaacaggaaagtgactggtataaatctgagaagaaacgcaaagaggatataaactctttctttgataaattcgaagaaaagtatggagtcaaggaaggcttctcgttttatcactctgagtactttggagtctacgaaggaacagaagcgtatgaaatatttaaaaatgacattgttaaaaatcaagtagacggattctatgctttcaaaaaacgatctaaatactttaaagaaataaaagctatgattgagcaaattgaagaagtgtatccatttaggtctcatgatgagctggggttaaacaacatgactggtcgtcaatggataggtgacaggtggttctttggagttaaaactgaacagcttgttaatggagacagtgtggttgctactgactataaagattatctaaaaattgtaatggagcatttagattaaaattcaatttttaaagagacttataaggaggtgaataagtgggacgccataaagcaacgattgaaggattggttatgaaagaaaggtattactcacaccgtgccccaggcacagagaggtggattactcagccagtgtgtaaggtaactcgtactgaaccaatcttcgagggctatatagatattgagcctatagaaattggaggtaaagtttatatccctggacttaatgaatatgtcatagtgactgacaggcagcgaaacatacataacgagtggacatatcaaacagacagagttattaagacaattatagatgaaaaaagcttgaaggaatgcgaagaacacaataataagaaagcaaaaaacaatgatactcaaaatcaaagacagataaaaacttcctggtggcagaggctaactaaaaaagactaaaggagagatatttattgaataaggatacaaaagatatttggagcggattctttatggggtcaggttcgttaattgtagttggattacttatttttgttgaagcgttgactatgtcactaattgtttattacggattgaatcatgtgttaaatcctttgcttattgatacatacaatattcaaaatgtccatgtcactttacctcatgcatttgttattggtgttttactcaatgtatttgtcaaaggtgtaaaacggtcagatcaggaaaaagatgagaacattttcaagaaagccggtaagtctttatttcattcaactttcgcattgattgttctatatgttagcacattgtttatctaaggaggcactcaagatgagtgatgataatgctgcaaagattattttcaaaaagaaatcaactggtaaaattgtcggcgaaatgaaagctacatctttagctgctgacaccattttgcaaaacgacaataagtctaaataaaagttttattttaagccgaaattttcaaaaggagagttagatatgatcttaaaagaaattgccgtatatgaagaaacactgaataaacatttaccaaatgaaacaagaatggttcttcattacaaaaatgtagaggcaactgaaaacgaagataaaatcacagtaaggattagtaatgatttattggtttataaatgggttgaactaggcggtgtatctaagggcacttataaaatgaaaatgactagtctagaagatgaaacaagcgaagttaatgtgaaaatcgaaagaattcaaatgaactcagacagagatttggcggtagaaatagaatttaatgtgctcaatccattccagagcgttgtgggtgtacctggtattcattcgttctccataaaaggatgattttaaagagattagtggattctaaatctaaaaaataaatattaaaaggagcattgtgctatgggaattaaagcagcagtttttgaaataaaagcaacttgttacgctcatgaaggatttaatgacgaaagtccatctgttcaaggagcagcgttagaacaactaggcaaggatatggtagatcatttgctcgaaaacggagttgatgatgtgaaaattaaaggcgattacgttgaggaattggaagttgaaaaacccattatgaagtattttgaagtgtttgacccctattatgcattgattaaggcttatacaaaagaaaaggcaatggaactgtatacagatactgttacagatgatgatgatggagagttaagtgatgaaatgacagaagttgggcaagtttatgcggcgatacaacatggaagggcgccaggagaagataaagagctcatgccgtttaaacaggttcttgaggagatttctaatgacgaagagatggtattgcttattgatggcagtttactttaaagaataaaaataaattaagaggatgatgaagatgaaaatgaaatatggactttattgtatgggatcacttgttaatacttatgatgatgcaattgaggctcataatgatgcagtatatgctcaagaagaaagcggagtaccgcatgaagtaagagaaattcaataaaaataagaggaggatattatatgattcaagggttttataaagatcagaaacttcatcttctagaagatcctatgcagcagtacaccgtcatgaaagttgaagaaaatgcagtatgtgtttaccggtggatcgatgattatagacacaagattgaaagattcacagatgttgaagaggctaaaaaactccttggagaagggtggccgaaacaatagaagacacaatgaaatttatacagaaacaattggaggacgaatagatgtcgcaaagtaattataggccgtcagttcctagatgggttggcgatatactagagctagacaagaaaagaagacaaaatcagtacagaggctcactaacgtcaggtcaagagaagaaggactgggacgagtggaagcgtagatattcaagaaaattaaagtacgcaagattaaacggatggacgatcgaagaagagtgacaattcctaaggaggacgaataggtactgcttgaatctagataaaatcacagctttattcaaaatacaaaaaataaggagatgtaaaatgggggcagctagacgtattgatccaactcaaccatatgtaaaaaagaagaacattattaactttacagtagccactgagaacactcatattcatttagctgatgggcaatctttccctgtattaaaaggagagattattgcaactgaccaacaaggaaatcaatttgttgaattagaaaagaatctagatgattacgttccagttaagaaaagttccttatatgaaagtatggcacagggctacatggaaatgggcgacattaatcgtgagatatcagaagcattcaattacgctgaaaatgaagctgaaacagtgactacaaaattaattacaggggcttataacgattagtgatcattacatatgagagtaaaacaggaaatgtaaaaaggtttgtcaaagcgctgcaacaagagtttgacgttgaggcaattgaaataactgatgatacgatcatcaatcaagaattcatacatattacatatacgataggctttggggaagtacctgaaaggactttgagttttatcaataagaataaaaataaaattagaggagttgctgttagtggtaacaaggtttggggtgataactatggtttagctggagacaagctttcagctaagttccacacaccattgttattaaagtttgaacttagtggaacgaaacaagatctacagaaaatcattcaggaggtacaacttattgacaaacacaataccaaattggatcaagctcaataatgaaatcatgatccagaaagatgggaagtatcaatttgaaaaggataaggaggccgtacatagttactttgttgattacataaatcaaaacacagtctttttccatgatctgaaagagaagctggactatctgattaaaaatgattattacgaggaagaattcttaagcaaatatacattcgaacagattaaatcaatctataagattgcttacagttacaaattcagattcccttcttttatgagtgcctttaagttctacaatgactacgcattgaagacaaacgataaaacaaagatcctggaaaggtatgaggatcgtgtctcaattgtggctttatattgcgctgatggcgattacgagaaggctgttgaggaagtacatactatgatgaaacaagagtatcagccagcaacacctactttccttaatgctggacgtaagcgaagaggtgaaatggtgagctgcttcttacttgaagtaggcgacagtttgaatgatatttcacgtgctattgatatttccatgcagctttctaagctaggtggaggagtagcattaaatctaaacaaactaagagccaaaggtgaagcgattaaagacgtagagaatgcgactaaaggtgtcgtaggtgttatgaaacttctagataatgccttcagatatgccgaccaaatgggttgatttggcccctttcatcagcaatggtgatcgaaaacctctttaattcatgggaactcctacagggacaatcatgagcgaagcaagactaagtcttgaacgtgcaacgactagccgaaaggcgtaggctgcaagctattggcagtcgaaacaggaggcacccttagagggtgaagatatagtctaaccttcatggtaacatgaagcagccatatggcgggacgtgcttagcgaacacgtttgaatggtctgcaaagacaaggatcaggagcagtttatctaagtgtattccatccagacattacagacttcctggataccaaaaaaataagtgctgatgaagatgtccgagttaaaacactgtctattggcgtagttgttccagacaaatttattgaattggcaagggaagacaaggattattacatgttctatccgcattcagtatacaaggagtatgggcagtatctagatgagctagacattaatgaaatgtatgatgagcttgttgaaaatccaagagttagaaaagcaaagggaaatgctcgaaagttgttggagcaattggctattctaagaagcgaatctggctatccgtatattatgttcgctgacaatgtaaataaagtgcatccaaatgaacatatttcaaaagtgaagttttcaaatttgtgcgttactggagaaacacttcttttaactgagaatggatatgaaaaagcagccgatctttataaaaagcagaatgatcttaaagtggtcattgataatagaacaaaagattttgcagttggtagcaaaggtaccacaattgtagatgcaattccaatgcaactgactaaaaaagatgcggaaatatttaaagtcaaaacgaagcaaggatatgaaattagggcaactgagtggcacaaattctatgtgaaaagagatggtgaaattcaaaagctccaattgaatcaactgaaaacaggcgataaattattagtccaatcagctgaaggagcatacgggaaaattcatgaacccgatcttgcatacattatgggcattatagctggtgatggaaccattactgaaaaaactgccaagatttatttatacgataataaaaaagttcttgagcagaaagttactgatgcagttcaccgtattattcaaaaacacaaggttgatcgtgcttataagcacaatacatcacttctcccaacatttaatatggccaacccagaaaaacaagatttgctctacatgaatagtactgtcttatttgacatcttgaagaagttcggtatgaacaaagaaacaaaaacaagagtcccagaattcatttttcaagctaataaggaaacgcaagcagcttatttatcgggtttattccagactgatgggtgtgtaaatgcaaatcataaagccaaagcattaactattgagttaacatccatccactatgagagccttcaggacgttcagaagctgttactgaacatgggtgtttatacaacgatttattctaacaacaagcgctcacaagaactccttcctgatggaaaaggtggttctaagctttacaatgtaaaaccaacacacaaaatcagtattcaagatagaaactcaagagagttgtttatgagtattgttgaaatgaaagaatacgatgtttataaattcaatttgttaactgagacattgcaacctaagtcaagaaagccaaagcatgattttacagctgaaattattagtattgaagaagatggtgttgaggatgtttatgatacaacacaagaagactatcactctctgattttcaatggaattgttactggtaactgttcagaggtacttcaatcgtcacaagtatcagtttatacggattacgataaagaggatgaaattggcttagatatctcatgtaatcttggctcaatgaacattgtaaatgtaatgagtaatcaatcaattgcttcaacagtcagaatagcaattgactcactgacaactgtcacaaggaaaacaaacattgtaaatgctccagcagttgcgagagcaaatacattaatgagatcaattggtctagggcagatgaacctccatggatttctagctcaaaataatattgcttatgaaagtgaagaagctaaggattttgcaaatacatactttatgatggttaacttctactcactgcagcgttctatggaaattgcacgagaaacaggggagacatactacaagtttgatggttcgacttataaatcaggcgagtatttcgaaaagtacgtaacaaatgattatagccctcagtatgaaaaggttaaaaagctatttggagatcaacatattcctaatattcaagattggatgaagcttaaagaagatgtaatgaaatatggtctttatcattcctatagacaagctattgcgcctacgggaagcatctcatatgttcaatcatctacagcaggtgtaatgccaattatggagagaattgaggaacgtacatacggaaacagtaagacatattatccgatgccaggtttatcggctcagaattggttcttctataaggaagcatacgacatggatatgtttaaggtagttgatcttattgcaacaattcagcagcacgtcgaccaagggatttcatttacgttgttcttaaaggatacgatgacgacgagagacctaaatagaatagacctctacgcacatcatcgtggaattaaaactttatattatgccagaactaaagatacgacccaagagggatgcttgtcctgtgtagtttaataggtacgtttacgttttggttcaaaattaacaggatctcccggacgtcgtttgcacttaattttgttaaattttctcataagagcattacaaagtaaaccaaatataagcttcaaaatatattcgattaaacatgataaaagcctatcacacaaccatccagttgaaatgactgtactctctaacaaagatataaggttatctaaaaaattcactgtctttcattcctttcgaatgtttgacagtaatataggagtctgtcaattcagcttttaaattcactgcatttttttcggaaaaaaatatttcaattgaaaggacatgattaattgacaaaaatttatgacgcagcaaactggtcaaagcatgaagacgattttacccaaatgttctataaccaaaacgtgaaacagttctggcttccggaagagattgctttaaacggcgatctcctcacatggaagtacctcggaaaaaatgagcaggacacttatatgaaggtactggccggacttacgcttcttgatacagagcaggggaatacggggatgccgatcgtggctgaacacgtagatggacatcaaagaaaggcagttttaaatttcatggccatgatggaaaatgctgttcatgcaaagtcttacagcaacatctttctaacattggctccaaccgagcagatcaatgaagtctttgaatgggtgaaaaacaataggtttcttcaaaagaaagctagaacaattgtttcagtctataaaacaatcaagaaaaacgatgaaatttctttatttaaaggaatggttgcatctgtgttcctggagagttttcttttctactcagggttttattacccactttatttttatggacaaggaaagttaatgcaaagtggagagatcattaacctgattatttaatagtcccttttgtcggcaacggcaaatgtgaacctctctaattgctggaaaatccttattaggacaatcagcagcgaagctatgcgaacccaaaggaggtgaaaatgataaggaaagaagtcgaagaagcaccttggtggataacggaaacgggagttatcatatcaaaaaaattaaagaaaccaagaaagacatttattactccacatggctatgaaatgataggatacacgcatccgaaaaaaggaacacagaactatttagtacataggttagtcgcaaaatattttatttatgatataccaaaaggaatgtttgtaaaccacatagatggaaataaactaaacaaccacgttcggaacttagaaatagttacacctaaagaaaatactctacatgcaatgaaaattggattaatgtcaggacaacctggagaaagtaattcaatgtcaaagctcactaatatggaggcaacaaatttaatctatgatttgattgctggaatgaacaatgttgaagctggtgaaaaatacagccttcatcctcgttacgttagtctaattcgacataaaagaagatggaagactttatgggatcgcatagaacgttcaacgactatcgcataggcggcgaaattccgcaaaacgagtagggcgcaagctattggcgtgggtgagaaccccttaaatcgaaacgggaggcatcctacagggatgatgatatagtctgctccttacggtaacgtaaggcggttgcgacagagcaacgaaccgaaagtagcgaactcggttgaactaagggtattagagacgaagcgatacatggcgtatatgtaggattgttagctcaagagatttataagaagcaaacgccacagaagcaaaaagaactgtacgcatgggctttaaacttactgcaggaactttacgaaaatgaattggagtatacagaagatgtctatgatcaggttggattagctccagatgtaaagaaattcatcagatacaacgcaaataaagctttaaacaatctgggctttgatcattggtttgaagaagaggatgttaatccaattgttatcaatggtttgaacactaagactaaatcccatgacttcttttcaactaaagggaatggatacaaaaaagcaacagtggagcctttaaaggattcagatttcatttttaccgagaaaggatgtattcaatgagattaattaaattagagcagcctaattgcaatccatgtaaaatggtgtccaattacttagaacaagtaaatattcaatttgagactgttgacgttacacaggaaccagaagtagcagcaagatttggtgtcatgggagtaccggtaaccattctgctgagtgatcagggagaagaagtaaaccgaagtgttggttttaagcctaatgaacttgatgagttactaaaggaattacgataaaagggtaattttaaacaaacttgaattaaaaggagctaatacataatgcaaattaaaatcaaatacttagatgaaacacaaacaagaattaacaaaatggagcaaggtgattggattgatcttcgtgcagctgaagatgtagcgatcaaaaaagatgaatttaaacttgttccattgggagtggccatggaattgcctgaaggttacgaagcacatgtcgttcctcgttcgagtacgtataagaactttggtgtgattcaaacaaactcaatgggtgttatcgatgagtcttataagggtgacaacgatttttggttctttcctgcttatgcgttacgtgacacaaagattaagaaaggggatcgaatctgccagttcagaattatgaagaagatgccggcagttgacttgatcgaggtagaccgtctaggcaacggtgaccgaggtgggcacggatcaactggaacgaagtaattggattttgtatttgaaatatagattattttaaaagtcatcttgaaaaacatttttaatcatattacctttttctaggaaaggggattaaaatatgaaaataactattgaagaattacctgaattaaggattgcttatttccgaaacgttggagagtatggtggtaagcaaaacaaagaactaatggaatcttttaaaaagtgggcacagttgaatggtgtatttcataactctgtaattttaggaattccacaagatgatccaagtattactcctaaagaggaatgccgttatgatgttggtgttgtattaaatgaagattttaatgtgctgcaaccagctcaagttggtaagttacctggagggaaatacgctgttttcttgcttgaccatacaaaagaggcagtaagtgaattttggggcaatattttctctgaaatagaaaaaaatagtctaactatgagaggagaaccaattatagagagatatacttcacaaatgattgataatcacttatgtgaagtattagttcctatccaataaagaaggtgggtaatttcccacctcctatatatgtataagttaaatgctctgaattaactcgtttattttatcaagattaatggtaatgttgcatattgcaattacgaagtatagagtaccttggtatcgttcttttttaacaaaacagttaattccaaaaccaatcaaaaatgcaattatgattagctgaacgaacacaaataattgtgaattaggactgaagaaagaataaaccaataataacaatagaatcagtaagctaacgatttttaatatttttcgcaaattaacactcctttaaatacattgtttttaatttaccataaaagatttttgttggaaatatttccgaataaaagaatacttttatctaatatttaaggaggaagagattattaacagcaaagaaagagatttacaagcgaaatatgacgacatgctttataggaacggtctttgctttgggtttcttcagttacaaggacttgaagatgaatttattgaacatatgagacaagttgctgagtacgagaaagacctgagatacaagaaggcagcagctaacttcatgaagatgcatgaccaaaactgggtgggggattaattgtttaaggataaaaataaaataataaagagtgttgaaaagatcaacaaacttgaagaagggttgtcgctatttgaagaaggtgacgaagaatatttaagtgtattagtgaaaattcaggggctatatgatgaaatctcagatactgctttagagtgttttaaagagatgactacaaaaattaggaaaactggtcagaaacggattataaaagggattgatcagttgccacatacaattaaagaaaacattgctgatcaagtgaatgattttaaagggggagctatttgaataaaagcaaatattaacggtatagagtttgagggtgagtaaaagccaacccaacacaaatataaaattaggagatgtttactataacatatgtaactttatttctatcagcttatctaattgtattaaacattaatgaggtcaggttgattatgcgaggggaaagcaatacgtatataaaagtaaagagtgtgcttgataattcaactccagaagatgcgaaacgaaataagaatttaatttacctgtttactttgcttaaggggagttctttaatcatccccttggcatataacggtttaattatgcatgaaaatatccttatactctgttggacagcattttcagttatatacacagtcctaagcatgtttaaggttttagacgtgttggagggcgaaacagtgagccatagtaggtatatttatttggcttatgtctttgggaaccttatctttgctttgagtattatttttcatataatgtgaaattgtgtttagctgcactcattatacggctcaagcccttttagcatttgtcagggctaagtaaatggatttaagaatgaaaataaaataactatagacaaatacaaataatatgtataatataataatagaagatgatgaaatgacagtttttttatctaatatacaaaaacaaaaaatatacattttttaaaactaatattttattcaaactttaaggaggtgattcattggaagtaggagacaaaatacataacaccaacgaacagataacagccttagagaaaaagaaataccaaattgaaacaactttacttgaaaaacaaagggatctgttaaaactcgaaacacagcaaaacaaagctaagcttgaattgttattcgagctaagtgaagtcttaacccaattggaaggtgaagagtgggtaagtgccactattgctttacgaattattaaaagaaataaaagaaagtacttagatctctttgatcttaatgatgacaaagcatacgtaaataaggataaatttaaatttcttcatgatgaattctttgagctgaaacaacaattaaatgatatctgaggagttgtcagttgacggtagcgaaattggaggtgacaaatatatgtgtacatgtgaagagggtagtggcaaatgttcttattgtgacggagcgctggatatattctaaatgaagagaacgcaatttatagagtggctaatcaaaggaggcaataaaatggtacagacattacacagtgcaagtcgaggagcttaataatagtagttagtgacataaaaagaggtggaaacaataccattagttctgtatggatttagagaagacttaaaaaagagaggggaattatccccctcataaattaatgaaattgaccgcccatgttttgttgagctaagcgaactaaacgtttagtgatttctccaccaactgaaccgtttgcacgagatgtagtctcagcgcctaattgaacaccaaactcagaagctatttcaagtttcatttgttcaatagctgaagctgcttgaggaattagtaaatcattattgttgtttgatcttgatctactttgttgagccatcttattcatctcctaaagtgtaatgaaaacaagcttgtttgaatcatattatggagagattattttaatttatacacgccaaagaaataaatttttcattaagaaaggtggagacaaaatgaaaattgattatgtttcagatctccatataaatcattggattccttggaatgtaaatcagattaagtgggagaagcgaacaagagaaattgtaaataggttaatctcaaacggtaatggggaggtattggtcattgccggcgattttactgaatggaatcaacaaactttatgggttttagatgaggcagcaaagcaatacgagaaggtttactttacatatggtaatcatgatctttatttacttagcaagagccaaaaaaggaaatactcagactcgttaggcaggttgaatgatctaattcaaaaagctgctgacatgaaaaatgtaacaccattaattaagacaactgaaacatacaaaggaaaagtctttgcaggagatgtaatgtggtaccttccaaaaggaatcgaaggatgggacttctttaaaggagtatctaacgattctaattacatttggcttaatggttataacaaagtagatggtgtaagagcgatgtggaaagaatcaatggattggtatgaaacgcttgaaaatacacaagttgatgtatttgtctcacatgttccacctgttcacaatccttattctccatttgagcctaatacatgctacatggttgatgtcccgttcattaacgcaaaacactgggtttgtggacatgatcatttacaagctgagtttgacaaagatggaacgagctttcacatgaattgtatcggatacccgtatgactatgataattatccgagtgtcaatgtgatacctggtgaagaagtagattcatataaaacgtttgagcttaaaacattcgagatttagatttaattaaaattctaattttatacagaagggaaggggagacatggaaaatgaagttgtgtttttttgtagaaaatgcaatcatcacttgtttgctaaaaatcctatgataaacacattaaaggttatatctgaaatggattgccctaattgtggagaagagggttatcataattggattctttcgcatataggtgattcagagaaagaaaaggagaactacaattggaagtagataaaatgttgaatttattaagaaagaggtgtagctataatggacagtagagaacaaattgattggacttgtaatgaatgcaattttagttggataggtgacaattcagatttttcatgtccttcttgtgatgaaatcgatataaagccaaaaaataagatacttgattgattaagacgttgatttcatttagtgggataaactcaatgaaagagattgaatttgaagaagttaaaaaatttgttgaagtaatgtctcggcgacttagatcaaccaaggtgataaaaattcatatcagttatgcagaatggttagttgcagaagtcgaacgcttaagggggttagtcaagtgagtaatagtttagatgtacaaggagggattgaatggagaacgtaatgtcctggtttaatatagactttgaaattaaatcagacaataacattgataaaactttattgtgattatttgatcttatgaaggaaagtctcatgatttatttcaatattgaaaactcttctgatattcatgagtttttaaaaatcgcagtagcaaagaatgatgttgattatcccttccttgaatggataaaggaaaaaggtattccaagattaaagaatattgattttaataagctacccaatgacgatcgctttcttgccatgattgagtttgatgaatttgttctgcaaaatgaaatggattttgaagatcctgaagaggttcgagggtgtattatttcaacagttaatagcctgaaggaatatattaatatctgccacaataaaacatgattggaggaaagatacctgattgttacagcctggatattgttaattgtgtttggtttattcgctttatcagattttgacttaactgagaacgaaacaaagcatattaagtttttcattttaatgaaatttgtttctgtctttatagctgctattgcagcaggagtgatttggggaggattatttcaatgattgaaatttttaaagatacaggagctacccatgatttagtttatcattctaagattaacacgtttgtttgggatgtggaatttgacattgttttatcagacagtaaggaattaaataaatgttattttgtgaaatgctttaatccgtatcgaataaatggaaagtgtgattttgcggttagttcaatagatatattttccgaaggtaaacgtctcttaattgaaaatgaattcaattttaaaattacaaaggcagtccacgtggcaacatcaaaagacgtaactgaaatagttttgcatttaagtgagagaatcagtagtccatttccaattgtaaaagaagttgtttatctagattaatgtaaataggaacaggataaaatcggtcttttatttagaataaaaataaaattagtggaggtattatgtgtaatcgaaatgttattacaattccatatgaagaggatatgtcaaagtattcaatactacaccaggtaggggggcgaattgagtattttcaaaaagagtattcacaatatccaatgttcgcatttgatagtgaagaggattacaacgaatataaatgcttaataatgcagcttaaaaagaataaaaaagtctctagtttctctttttaaaagagtagggtattgcaaacaacagtttaatatgcaaaaagtaatgaactaaatattgcacatatgggaaagaggcgagaaaaattaacgaggcttatcattcaattcaaacactgttaaacaagatggatagacaaatgaagacagtgaaggaggccattgaagaaaaagatttgcaaagagcacatcgtaacttaattaacttggctgacaataatgaggaattaatgcaggaaataaggtgggtcaaaaagggaaccatattataagttatttggttaattgtctgcgctctttaaagttccatacataaagctcttctatagagcaacctatggcatcagcaaatgtcattgctgttccaatattcatatttgatttaaaaccacctacataatcattaatacgttgttttgataatccagtacattcaacaagatcttcaattgaaacgctatattcatgcatgagctcattgagtcttgaatcaactggtttccattgttttttcactatgcacacctctttcagcaacgattttagcacatacataatttaccttcaatatagattaggagagtgattgattgggagcaaacaatcaagggaaagtttttgaagcgaacattgaaaaatctgcagcagatcaaaagttattcttttaccggattaaagatgttaacccaatgttcttgaaaagaggggcagcagtatcaaaaaacaaatatgattgctttctgttctttaaggggtacttgttcccctttgagcttaagtcgacaaaaagcaagtccatttccttcagcgagaaaatcataaagccgcagcagattaaatatttaagggaagcaacacaatacccaaacataatccctggttttctgtttcaatttagagagccggaaaacaaagtttatttcgtacatattaatgatttccttacatataagaacatagctgaaaaacagttgaaacatacatataagaataaagtaaacaaagccagtatcccgattgcgatttgtgaagaaatcggtactgaagtgcgctcgatgaaaaagaaagtgaattatacatattatttaaacaagctttgcggggaactaattaagaaagaacagtcaagagacaaaccattacatacatataatactcctgtgaaaacgggggtgtagccttggaaccttaccaacgttatgaggaattaaagaaaaaaacaataaaggtagtccagaaagaaaattacagtattcgatatataactcaggatgaagcaagtaatgacttagatgagttttataaacaatttgctcaacatttattagaagctgctctggaaaggaaggcagagtaagcttctttttttcgttagatatgtagtaagtatcttaatatacagctttatctgtactgatattaatgacatgctgcactcggtgtgaaagggcagcttccaccacattttgtccgccgatgagattggtctggatcgcttcaaatggatggtcctcacatgtcggaacctgtttcagcgcagccgcgtgaaagacgatatcgacgcctttcatcacctgattcacccttctgtgatcgcgtacatctccaagtacaaataatagccgcttatcctccgcatacttttggctcatgacatactgtttactgtcgtctttgctgaatacaatcacctgtttaggtgtaagcatcaaaaggcgtttgacaatttgactcccgattgaacccgttccgccagtgactaaaactgttttgttatggaaaaatggttttagttctgctgtttgctgtttaggcatggcttatcctccaactctcgtttctctaccatgcatcatatgttcaactttgtaatcgaattaatgaaagcaaccaataaaacaaaatttaggggaatgatcatgtcacaaagtgttcttttttaatagaaaatggaaaaacggacgtaactagggaaaaacaaaactaaataaataatgtactaaatattcaacatatttttatttcgctccgcaaaagtaaatctggcaaagtcatctcaccacctctttggggaataagttgtttatgagtcagaaaccctataaaaaaaggttcattttcctcacggtaatcacctgtatatattttacaatagtagtgttagtgataaaagaggagggtaccaaatgaaggttccaaaaacaatgctgctaagcactgccgcgggtttattgcttagcctgacagcaacctcggtgtcggctcattatgtgaatgaggaacatcatttcaaagtgactgcacacacggagacagatccggtcgcatctggcgatgatgcagcagatgacccggccatttgggttcatgaaaaacacccggaaaaaagcaagttgattacaacaaataagaagtcagggctcgttgtgtatgatttagacggaaaacagcttcattcttatgagtttggcaagctcaataatgtcgatctgcgctatgattttccattgaacggcgaaaaaattgatattgctgccgcatccaaccggtccgaaggaaaaaatacaattgaagtatatgcaatagacggggataaaggaaaattgaaaagcattacagatccgaaccatcctatttccaccaatatttctgaggtttatggattcagcttgtatcacagccagaaaacaggagcattttacgcattagtgacaggcaaacaaggggaatttgagcagtatgaaattgttgatggtggaaagggttatgtaacagggaaaaaggtgcgtgaatttaagttgaattctcagaccgaaggccttgttgcggatgatgagtacggaaacctatacatagcagaggaagatgaggccatctggaaatttaacgctgagcccggcggagggtcaaaggggcaggttgttgaccgtgcgacaggagatcatttgacagctgatattgaaggactgacaatctattatgcaccaaatggcaaaggatatctcatggcttcaagtcaaggaaataacagctatgcaatgtatgaacggcaggggaaaaatcgctatgtagccaactttgagattacagatggcgagaagatagacggtactagtgacacggatggtattgatgttctcggtttcggacttggcccaaaatatccgtacgggatttttgtggcgcaggacggcgaaaatattgataacggacaagccgtcaatcaaaatttcaaaattgtatcgtgggaacaaattgcacagcatctcggcgaaatgcctgatcttcataaacaggtaaatccgaggaagctgaaagaccgttctgacggctagaatagaaagcagcttgtgcagctgcttttttctatgaataaaaaaatcgttcatagcaatgaacgatttttcaagaaagcgccagatgaatcgcttttagttttgcaggaagctcatcaaacgtaaatgcgggtacggtctctttataattggctgctgcagctttttgccgttcttcagggtggttgatatagaaagcggctttttccttaaagtcgttcatgccgtgataagaaataatggatgaaaaaggatgcgccgcgggtaaatctgttaattgaaatgcttcgcatgcagcgatatcaaacgttcggttattaaaactggcatttttgatgcgcatagtattttggttgaaagcaaaatgatagggacgatgcgcattaattacgatgtctgccccattataataatgaacggcctgttcgggtggaacccatgtgctgacgacatcaatatgcggctgtttgagcacttttttaggcagatattttccccattccttgccgattacccgaaccgtgaatggcagatggaccgcttctttcataagctgaacccgattagggtaaggatagccgatgattaacagatttgaatgataggaatgttcggtgcccatttttttaaacagccgatggttaactggtatcggaacataatagacgttctggtagccgagctcttgatagtagagagctgcattttgttctatcgttaatatggcgtcagcaagcttaattacctgaaggctgatatccatataaaatgggtcttcggtcagccaaacatacacggggatatccttaccctttaaccaggtcagccagtcgtgaggaacgcggtctccaaccatcataagtgtgaaatccggctgaaacgcttcgatcttcatcaaagattctgcttcaggtttatctgcaatcatatactctgtatgagtgttctgaaaacattcttcagcccagcgatcaaaataactgtatattcctccgtatcccgactggatatacaagactttcatcggatgttatgaaaagaacgtaacgctttctactttgtctacatcaattaatgttgtagcttggcctgccggagtgacggagctttcctgtgttacaaatacgatcccgtgaacctgatcgaaagcaacgaaaacaaccggtccgatcatgtcacctgaatcagtcacaatgctgattgtagtgcctggcgtaattctggcaaaaatccatcttgccggaagagaagggtctaaaatagattctgccgtaaccgtttcactttcatctactttttgatcgatggcagcatcaagcaaggctttaagattactatccatattttctcctccttctgttgcagttggaaataaagggcttaaaacggctttaattaaatccttttttaactgtgcattttcagagctcattacacacacctcctattcgatagtgaactcacgttattcatattcttccggctgttatttggtatgagtcgaacgccgtacctgatctatttttcatctatttaaggaaaatgctgattttttaatggagtggacatagcctataccataaatcgaagtcgcacatattgtgaaacagagataaggataagggagagggatgatttggatttagagaaacaagtggatcgagaagaaaaccaagatgatctgcattttattttgcttttgctgattctgctgatacgtcaatcgtcttctgaaggaaatccatctgacctcagacgccagcttgtttttgcaaaagagctgggcgtaccggtttcaaaagtcaatttgatcaacggagatacacttcaaaatgtcatcgtaaaagaagttctgactgatttggttattttccaaaacccgttaaataacacgagatctcatgtttcactctcaagtgttgtaagctggggtgctttttaaatgatgacagaggctctgcttgctgcggagccgtttttatgtttgacggcgggaggcggtatagatgggagagaaagtgtctattattttaacaagttacaacaaacccgattatttgcaaaaagcgatcgaaagcgtgatacagcaaacgcatgatctttgggagctttttatcatggatgatcattcgaatgcagaaacaactgcggtgattcacaagtatctccatgaccggcgcattcaatatcataacagtttcgtgcatcctgcagatcgattaaaaacagcccgttatgccacattaattaacagtgcgctcccatttgcagacggcgattacatttcctatcttactgacgacactgtttatcatcctgagcggctgagccgtatggtgcaagagttttcacataagcctgaagcgcaggcggtctattcaaaacaaaaagttgtacatgtaaacgaaaggggagaggaaatctcacatttctacagaaatgccaatgcagtgcttgatcaggccgcttttcaagttgatcattgctcagttatgcatcgccgttcgttacttaatctcattcaccataaatttggaggctactgggatgatgatatgaagcattggaatcatggcgacgcaattttttgggcgagactcaacaactttaccccatttctgccgataaatgaagtattagacacaacctataaaaccccagattcatttcaaaatgcatatcggtttctgcccgccgatttgattgacggctcttttgtaaaaggttcagatcaaaatgtgtatttttttgatcagggtgtaaggcatcctgttggagaaaagtggggttttttgtatctaaatcggactgtcgctgttccagacccatatttattccaatataggattggcaaaattttaaacattccgaattatattttagtaaaggaagctgaccatcctgcaatattttatatcgaagccggaaaaaaaaggcgaattgtggaccagtatgcgtttcaattttatcaatttcaaagaaaagacatagtgacaattggaaaagaagagatggagacgcttccggaagggccgccgattacgtggaaacgatctgaattgatcaaaaatccgcctggccgacgtctgtttttcatcgaacgcgagccgtttttgtttctaaacggcgtctttcacccgattagtgaacaagtaacaaggaagttttttttacatcagaagccaatctccgcttctttccgaaatattcagcaatttccaattggaaagccgttttatccggtgtacgatgagattataaagaaattgaatattgcaacagagtaaaggtataggtcataaaaaggagacgttcatgacaggacattattcaaaaacggaacatcaatatatattgttaacgtctgaatcggcatcgtttgatcattacagcgtatacagagatccgcagcttccgcaaattttttctcataactttgttcagctccatgatacgtttccattggagcggttacttaactttttaccctccgtaccaaagctgcttgatgcgaattatctccatttaaaagcgtcgccgcagcatgtttttccgctcggtttgaagcagtcacttgtaaaaagcggttttgtcgtcgaggatgagctactatatgacatgaagcttagtgactggaaggggcagatgggacatcctttaaccgcatgggggacggcaaaaagtcttagcgacggatcttctattatgaaaatttacgattccatttatattggagaagcaatcgctgaacaaaaattaaaaagaaaatatcctttctatgaagcagatataatcattcttgttgtttgttacagcgaccaggcacagaaagttcccattgggtgcggcgagctgtttatcgatcatcaagagaaaacggctaaaatcgaagaagtggcaattttagatcagtttcaaaggaagggctacggcagtatcttagtgaaagaaatgctgtccatcgccaaatcactaggaatggaagcagcctacttagtggctgcaagcactgacggtgcaactcagttttacgaaaagctgacgtttaaaaaatatgagcgggtgcatactgtatttcattatttccttacatgaaataggcgtttgcacaaaccatttgggacttggcccgcataaaatgtcgtatatcgtgataagaaaggatgaaaacagcatgtatggatactctgggtacggttacggatttggctgcgggacaaatacatttgtgttaattgttgtcttgttcattttattaattattgttggagccgcttttatttgctagatgctgaaatttcaaaagagccttccttattaggaaggctctttttatgtgaaaaagtttttgcggggaacgtcatgccgccatttggacactcatacaatatggtaaaaggggttttgaggtgggagcatgagcagttatttgattaagccagagcttagctcggcctatccggttgtcagttatgcgaagggttcatatgtttatgatcagaccggaaaaaaatatctcgacggctcgtcaggtgcggtgacatgtaatatcggccacggagttcgtgatgtgactgagaagctgaaagaacagcttgatcaggtgtcttttgcttaccgctcacagtttacgagtgagcccgccgagcaattagccgctctcttggcacaggagctgcccggagatgtgaattggtctttttttgtcaacagcggatcagaagcgatagaaacagctatgaaaatcgccattcagtattggcaggaaaaaaagcaaacacaaaaatccatctttttgtctcgatggagcagttaccacggaataactttgggagcgctttcattgtctggtttttatgaaaggagataccggttcacccatctcattgagcggtatccagctatctcagctccacatatttatcggctgaatcacgagacggaagaagactttgttcagactgcagctgatgaactggacaccatgattaaaagaatcggaagccaattcatcgccggctttgtggctgagcctattattggtgctgcaggagcagcgattactccgcctccgggatattatgagagattaagtgaggtatgccgcacacacgatgtgctttttattgcagatgaagtgatgacggggcttgggagaacaggaaggatgctcgcgacagagcattgggataccgtacctgatattgctgtactggggaagggactcggtgcggggtatgcacctattgctgctgccgtcgtatctgattctattattgaaaccataaaacaagggtcaggtgtgattatgagcggtcacacatatagtgcacatccctattcagccaaagctgctcttgaagttttgcgatatgtgttaaagcacggcttgatcaaacaatcagaaaaaaagggcgctgtgctgaagaagaagcttgatgaggcggcatctcaaagcggcattataggtgaggtgcgcggaaaaggactgctattaggcattgaatttgtggcagaccaaaaaacgaagaaagtgtttccgccagagcaggcgataacccagcttattgtcagcgaggcgaaaaaacgcgggctgattgtttatccttccaaagctggaatagacagtggagaaggagatgctgtcattattgctcctccttttactatttcagacggtgaaatggaagagcttatctctattttttcagaaacagttgcagcggtcgaaaaaaacttaaaaaaggattgacattaaatggcgccatttcaaaaagcaatcagcattgacacagcaattgcagatgttcgggatggatcggttctgatgtttggcggttttgggggagtcgggtcgcctccttcattgattgaagcgatattggacagcggtgtaacggatttgactgtgatttgcaatgacgccggtttcccggatatcggaatcggcccgcttattgttaatcaacgggtcaaaaccctgatcgcctcgcatatcggttccaatccagtagccggaaaacagatgacagaggggacgttagaggttcaattttcacctcagggaacgcttgcggaacggattcgcgccggcggagcggggcttggcggtattttaaccgacgtgggcattgataatcaaatggtttgcgaaaaaaaggacatcgtaacagtggcgggaaaacgatacttgattgaagaggcgctgactgctgattttgctttcatcaatgcttacattgcagatgaattcggcaatctaacgtatgacaaaaccgcgcgcaatatgaacccgcttatggcaatggccgccaggagaacctttgccgaagctgagcgtatcgttccgatgggggagatttctgaagaaatgattgtcacaccgggggtttttgttgagggggttgtacgaagcgagggagtgaagtggaaatgggcttgggagtagcagaaagagaacagattgcaaaacgcgctgctactgaaattaagcagggcatgattgtgaatctcggtatcggtatcccttccttggtaccgaactttttgaagcctgacatgcaggtcatgtttcaagcggaaaacggtgtccttggcattggagaaagtcccgaaaagggagaagaggatgcgcatttatgcaacgccgcgggatatcctgtccgcgctgtaaaaggggcttcttattttgatacaaccatgtcttttgcgatgatcagaaaaggcaaaattgacattacgattttaggcgccctgcaggtgagccaatcaggagatttggcaaattggcttgttccgggaaaaaaggtgcctggtatgggcggggcgatggagcttgcccaaaaagcgaaaaaagtggttgtcgtcatgagtcatacagatcaaaagggaaggcctaaattaacagaaagatgtacgctgccattaactgctgcaggctgtgtagatttgattattaccgaaaaagcggttcttgaggtcgatagccatcacttcattttaaaagagctgatgaatggctcgacaatcgatgaggtgacgaggctgacagaagctgaaatcaaaatagatatgcctttttcttaagagggggaatgaggatgcaagacattgaaagaaaagtaatcgagtggcttgatcagcattcggccaaagccattcgtcttctcaaaaggctgattggggaaaaaagcacattggggtcagagtttaacgcccaagctgttgtgcttgaaaagctgcggcaatttcatatggacattgatgtatgggagccaagcataaagcaattaaaacagcatccctactttaaatctaaccgatccgattttcatgagagcccgaatatcgtggctaaaaaaacgggagccggcggaggcaggtccctgattttgaacggccatatcgatgttgtgcctgaaggaagcgtaaaggattggaagtatgaaccgtatcaagctgtcgaagaaaacggtaaaatatacggccgcggctcaacggatatgaagggaggcaatacagcccttctttttgctttagaagccctgcacgcctgcgatgtcaaactgaagggagatgtattgtttcagagtgttgtagatgaagagtgcggcggcgccggtacactttccgccatcatgagaggctatcgtgctgacggggcgctgattcctgaaccgacgaatatgaaactatttattaagcagcagggttcgatgtggtttcggatcactgtgaagggattatccgcacatgggggcacacgctatgaaggggtaagcgcgattgaaaaaagcatgcacgttatcacagcgatacaagagctggagaaagtccgcaatgcgagaatttcagatccgctgtatgacaatatcccaataccggtaccggtgaatatcggcaccatctcaggcggtgcctggccatcttcagttgcagaccgtgtcgtcatagaagggagatgcggaattgctccccatgagaaaccagaagctgtaaaacttgaattggaaaactggctgaaggatttagaataccatgacgaatggtttaaacgccatcccgtacaagtcgaatggtttggcgctcaatggctgccgaatgatttacctgatgatcaccctttaatttctgtgctgcaatcagcctatcaaaaaatgaaacagacagagccgattattgaggcttccccgtggggaacggatggagggcttttgtaccatgcaggagatacaccagtgatcgttttcgggccgggggaaacaaaaacggctcatcaggccaatgaatacattgaggttgaagccatgatagaatctgctaaaattattgcactttttgtcatggattggtgcggccttcatacagatggggaggatgcggatgctcaagtcaataaagagtagcggtgtcacagcagttttggaccatgacggctttaataaacgaatcagagtggttcgttatgacggagccattgagaaggccctgccggatatcgtggcagcggcaaaagaagagaatgcagaaaaaatcattgtctatgcgaagcagcatgatgagccgatccttgccaaacaattatttgcgccggagggctatctaaagggctattatctcggccattcggcttgtgtcatggtacgttacctttcagaaagccggagacaaacagattcttatacagaggaacaggagatcatcgaagccatatatcgcacagcgccccgtcttcgcaacgacagtacacccgtttttacgatgagaaaagcagaaacaaacgacatgtaccagctatcgatgctgtataaaaaagtattccgcacgtacccaaccccggtatttgaccccgcttatattgaaaagacgatgaatgcaaatacggtgtattatatcatgcttgatcatgaccgcctgatcagcgcagcaagcgcagaaatcaatccagagcttgggcatgcagaaataaccgattgcgctgtgctgccggaatatcgcggccattcgttaacaagctttttaatcgaggcgttagaaaaagaaatggctggagaggatatcgttcatgtgttttctctcgcccgtgcttcgtcttttgggatgaatgctgtgttgtaccattcaggttatcagtatggcggaaggctgatcaataattgctttatagccgaaggccttgaaaacatgaatatttggtgcaagcaactgtaagtcaaaatatgcgcgaggaggagttcgtttgaaaaacaaatggtataaaccgaaacggcattggaaggagatcgagttatggaaggacgttccggaagagaaatggaacgattggctttggcagctgacacacactgtaagaacgttagatgatttaaagaaagtcattaatctgaccgaggatgaagaggaaggcgtcagaatttctaccaaaacgatccccttaaatattacaccttactatgcttctttaatggaccccgacaatccgagatgcccggtacgcatgcagtctgtgccgctttctgaagaaatgcacaaaacaaaatacgatctggaagacccgcttcatgaggatgaagattcaccggtacccggtctgacacaccgctatcccgaccgtgtgctgtttcttgtcacgaatcaatgttccatgtactgccgctactgcacaagaaggcgcttttccggacaaatcggaatgggcgtccccaaaaaacagcttgatgctgcaattgcttatatccgggaaacacccgaaatccgcgattgtttaatttcaggcggtgatgggctgctcatcaacgaccaaattttagaatatattttaaaagagctgcgcagcattccgcatctggaagtcatcagaatcggaacaagagctcccgtcgtctttccgcagcgcattaccgatcatctgtgcgagatattgaaaaaatatcatccggtctggctgaacacccattttaacacaagcatcgaaatgacagaagaatccgttgaggcatgtgaaaagctggtgaacgcgggagtgccggtcggaaatcaggctgtcgtattagcaggtattaatgattcggttccaattatgaaaaagctcatgcatgacttggtaaaaatcagagtccgtccttattatatttaccaatgtgatctgtcagaaggaatagggcatttcagagctcctgtttccaaaggtttggagatcattgaagggctgagaggtcatacctcaggctatgcggttcctacctttgtcgttgacgcaccaggcggaggaggtaaaatcgccctgcagccaaactatgtcctgtcacaaagtcctgacaaagtgatcttaagaaattttgaaggtgtgattacgtcatatccggaaccagagaattatatccccaatcaggcagacgcctattttgagtccgttttccctgaaaccgctgacaaaaaggagccgatcgggctgagtgccatttttgctgacaaagaagtttcgtttacacctgaaaatgtagacagaatcaaaaggagagaggcatacatcgcaaatccggagcatgaaacattaaaagatcggcgtgagaaaagagatcagctcaaagaaaagaaatttttggcgcagcagaaaaaacagaaagagactgaatgcggaggggattcttcatgaaaacatgcgaatggtgcggcgagctcgaagcggtgcccggcaggaacacggtgtactgggagctccctgatggaacgagggctatagaactgacagacacccctgccatggtatgttcttcctgcggtatgacctatcaagaggaaaacacggttaaagagattgaggatcagctgcttttaattcaaacaaaaaaactgcctgaaagcctgacatatcagcagctcatggagacagaaagaattttgaaacgcaactattttgacttctcctgagtcatgtttcagtattcttttgttgtaattttacacttgaactgtataatagaacaacaaaagacagacatcaggaggggaaacccatgaaatccttttatcactatttattgaaatacagacaccctaagccgaaggacagcatcagtgaatttgccaatcaggcgtatgaggatcacagctttccaaaaacatcaaccgattatcatgaaatcagttcatatttggagctgaatgctgattaccttcacacgatggcgacgtttgatgaagcttgggatcaatacgagtctgaagtgcacggcagataatagctgtttcatccgcagatcactgcggatttttttatgtccatacccataccataattggatatttcctttggttttcatgcccatgcgaattggcttcacccggcatacgatagcgtatgagaaatgttgcggcgagggggagacaccatgaagcaaaataaaccgaaattccaagtaggggatatcgtagtcgtcattatgtatggaacagtcggcaccatcacaaaagtacaccaaattgataaacactatctttatgaagtcaatcataacgaagttttatactttgaatcatctattcagctttataaagattatgagggtgtcattgtcgacatggagaagcttgatattgagtatgaattccttattggggacgttgtttatgttaaagattatggaaaagaactctttcgcattatcggccatagaacagaaatttggagatatttagaagatggctgggaagatatcatttatgagctgacccgtttaaaggatggagagtggcttgaaacggaggaagaggatctcacgctggtgcttagaaaatatgaaatggaccagtttgtgcatcagctgttgtttgtccattatgtcggagaaactggccatgagatcggcgaagatatcgcatcgtctgctcttcttcagtttgaaggcggtgatgaagatcaagatacccttcacatccttgctgtgtcaattgttgatgagcttctggatatttataatgactacaaaattctgtacgaaatgtttcaggatgaagaatataaagacatgatgatgtttgttttggaaagtttaaaagagcatttcagttaatttgtgaacatacggatcaagacatataaaaaatatggcagacagccccaaatcatcacacgcgtcattcctttgagcgttttttccattatgatatcaaatctttctccgtccagtgcttccatcattttagcaatcatagcgtcagcctcccatggctcgttttttattcaatatatgactgaaagaattgtttagaacaccgggtataattcagcctgttttttcataaaacataaaaaaggaggcggtacggagatgaaagaaatagatcttgtgattgatacggaagaaatcgctgaatttttttacagagagcttgcaagacggggctacataccgagtgaggatgagctgtttgaaatcgctgatattacctttgattatttgatagaaaaatgtatgatagatgaagagctggatgaagatgagtgaggcttaaaaccggagcggtcagctccggttttattattcatgttctatgacttctgtgaaaattgaggtggttaaaattgtacaagcccgttagtttgtttcttttctttttaattctagctgcggccattcatacaaatgctgttcaatctgcagatgaagcaataagcaaggcagctgttttgatccgtcagccatggcttaatgaagtcatgacggggatcacgcatcttggtgcttcttcttttctgctccctctaattgtcatcattggagcaggcatgtttttctacagaaaaacatgggacggcctgttgatgctcttagtattcggcacagatcggctgttaaacaaagtcttaaaagaatggatcgaaagagtgaggcctgattttgcaccgctggttcatgaatcatccttcagttttccgagcggccattccatgaatgctgcttgtgtctatcctgttattgcttactttttagtgaaacatctcccgtttttgtctaagcataaaaaaatggtatatatcatagccggtgtaattgctgttttagtcggcataagcagagtgtatctgggggttcattttgtgacagacgtgttaggaggctttagcctcggcttgcttctgtttttcctagtaaaaggttttgacgaaaagattaagcggtttcgacaaaaatagagagaggaaaacacagcaaaaacgccaatatgttaaagaaataaaagggaggggatcttgatgatgttatccgtgtttaaaaagaagtcttgttcctatgacgtgacaatatttcagacaccccggtttggcgaaaaaaagggctacagagccgtctatcgaactgaactgaacgggagcgatcatcaagacgtgctgaaaagagcattctctttgtttaatgtattcgacactgttccgagtgattatgatgcaagattcatggccacaggggacgtgatcctgattgatgaaggcagaaaagggaaaacatattatcaactgcttcccgccggctggaggaaaatcaatcgtctgattgtacaaacgacataatgaaaagaaaactgcggaaacccgcagttttctgcagttttaaggcttgcgtttggcagcggaatattctttcccgtgtgcttcttcagctgcaatgatatctttttcaggtatatgattgttctttttttggccggtgatccggttacgatgttttttacccatgtcccacccctccttcctgcggttaggttttcaaattaacaccccgattatccgtttttctgaggaagtgcctaacagatcctcgaacatttcttttttcgatatattcctttataatcaatgctgaagtttgtttcatcatgacattcgttgtaaaatggacgggctggatgataatttagatttacaggaggatatgagatgagtgtacatataggtgctgaaaaaggacaaattgcggatactgtgcttttgccgggagatcctctcagagcaaaatttattgcagaaacgtatcttgaaaatgtagaatgctacaatgaagtcagaggcatgtatggatttacgggtacatataaaggtaaaaaaatctcagtacaaggcacgggaatgggagttccgtctatttcaatttatgtgaatgaattaattcaaagctacgatgtgcaaaatctaataagagtcggttcctgcggcgctattcgtaaagatgtcaaagtgcgagacgtcattttggcgatgacctcctcaactgattcacaaatgaacagagttgctttcggaagcgttgattttgcgccttgcgcagatttcgagcttttaaaaaatgcctatgatgccgcaaaggataaaggtgtgccggtgactgtaggaagcgtatttacagctgaccagttctacaatgacgattcgcaaattgaaaaacttgcaaaatacggtgtgcttggcgttgaaatggaaacaactgcattgtatacattagcagcgaagcacggaagaaaagccctgtcaattctcaccgtgagtgatcacgtattaacaggagaagaaacgacagcggaagagcgtcaaacgacatttcatgatatgatagaagtggctttacattccgtatcacaataaaatatatcaagaggcgtgctgggtgccggcagcctcttctttatgcatgcggaaacgattgataaaaggaaggtaatgtaatatgaaaaagtccggtaaatggttctcactggctgccgctctgagtgtaacggcaatagtcggagccggctgcagcatgtcgaacggagatgctcaaaaggatacgaaaaccacagcagaaacaaagcaaacagaacaaaaaacagctgacagcaaaaaatcaaacactcaaaacagtgagttttcattggaaagccagtatttcaatgatattaaaaaagtcgatggtctggaaaccattcaaaatccagaaaatatactcgcgcttgtcaataaacaatatgcactgcccggaaactatgaacctagcgatcttgtcatacctgatgtagagttttcttttgaagaaaagattcaaaaacgttacatcagaaaagaagcggccgacgcattaaaaacaatgttcgatgctgccaaaaaggaaggctatgaactggcagctgtctcagggtaccgttcgtatgacagacagaaagtcatttttgacaatgaagtaagcctaaaaggggaaaggaaggcaaaggaagcggtcgcttacccgggtgaaagcgagcatcaaacaggccttgcgatggacatttcgagccggagcaatggctttgagctaaatgaagcgttcggaagcacggcagacgggaaatgggtgcaggacaatgcttataaatatggctttattattcgctatccgaaaaataaagaagatatcacgaaatatgaatatgagccatggcatctgcgctatgtaggcaaaaaagccgcaaaggtcatccaagataatgatttaacgcttgaagagtactttgaaaaagtgaagaaaatttaaaatgaaaagcccgcttacactagataagcgggcttcattgtgtctggtgaatctagcatttgttctatgcttaccagaagaataaaccagccagagccactcctgcaattaaaccgagggaaatcccgtaagccgctccatatccccaataaccgccccaatatccgtaaccgaaacctcttggccctccgccgaccggagctataaaaactctgtctcttgttacacgggtaattctgccgacgtgaactctcccgcctctctctgtaattctgacgactttaccttgatggtttttgcaaagatgataatatctctccaatattgttcccctcctatcctgactttctatcagcatatgatagataggaaaaaaaggttggacgaaaacagggggcgatacgccgttttacttgtacgcgataaaaatacaatgacccatgtactcactatataactgcatgagctgataatgtgtttgaagcgtatcgtaatagatgggatcaatcgtttgcgataaatccatttctgtggttggttcaaattccatgtcttccggaagaagtgacatcgcttctgttttttgaaagccataggatcttaggagtttatgccattcgctttcttcatgtaagcaagtaaatccgtaaaaatccatcatttgcttcttttctgcagggggcattggtttttttaaagcagcttcgataccaatcagcatcccgctgggttttaaaactcttgaaatttcttgaagagaggatgtcaggcgtgaaaaactgaggaccgattctgacaggacgcaggaaaaggactcagaagaaaacgggagatgttccagctccgcctgatatgcagggatggcaagcccttcattcgcaaatctttttttcgctttctcaagcataataggatctttatcaacgactgttacaggatacagcaaatgtcctaaataagccgccgtttgccctgttccgcatccggcatcaagaatcggctgatccggagagggtgcagccttttgcaagaccgcttttgaaaaagccagcccgcctgggtgcgcccctgcgacaccgaataaggacagcatttctaaatatcggctcaatatcgaatcctcctttttccttatcatatgtcgtataaagacataggtttatgaaaagcaaaagaagggcgtttctctttcatttctgctccgagttgacgaataagaattcgtccatgataataatgtaagaagaaaaaggtggtgtttaattgaaacggcaattaaaactgttttttattgtgctgatcactgcagttgtcgcttcggcgcttactttatttattacgggcaattccagtatcctgggccaaaaatcagcaagcacaggagacagcaagttcgacaaattaaataaagcgtatgagcaaatcaaaagtgattattaccaaaaaacagatgatgacaaattagtagacggagcaattaaaggaatgattcaatcactggatgatccgtattctacatatatggatcaagagcaagcgaaatcattcgacgagacgatttcagcatcttttgaaggaatcggagcccaagtagaggagaaagacggagaaatccttattgtatccccaattaaaggttcacctgctgaaaaagccggtatcaaaccgagggaccaaatcattaaggtaaatggaaaaagcgtaaaaggcatgaatgtaaatgaagccgtcgctttaatccgaggcaaaaagggcacaaaggtgaagcttgaactgaacagagcgggagtggggaatatcgatctttccattaagcgcgataccattcctgtagagactgtctattcagagatgaaagacaacaacatcggagaaattcaaatcacttctttctctgaaacaacagctaaagagctgacagatgcgattgacagtttagagaaaaaaggcgccaaaggctatattttagacttgagaggcaacccgggcggcttaatggaacaggcgattacgatgagcaacctgttcattgataaagggaaaaacatcatgcaggttgaatacaaaaacggttcaaaagaagtcatgaaggccgaaaaagaacggaaagtgaccaagccgaccgtcgttttagtaaatgacggtacagcaagcgcagccgaaattatggccgctgcccttcatgaatcgtcaaacgtaccgttaatcggcgagacgacattcggcaaaggtacagtacaaacggcaaaagaatatgatgatggctctaccgtcaaactgacagttgccaaatggctgactgctgatggcgaatggattcacaaaaaaggcatcaagcctcaagtgaaagcagagctgcctgattacgcgaagctgccgtatttggacgcagataaaacgtacaaatcaggtgatacaggcacaaacgtcaaagtggctcagaaaatgctcaaagcacttggttacaaggtaaaggttaacagtatgtatgaccaggattttgtatctgtcgtcaaacagttccagaaaaaagagaagctgaatgaaacaggcatactgactggcgatacaacaacgaaattaatgatagaacttcaaaagaagctgtctgataatgatacgcaaatggaaaaggcaattgaaacactgaaaaaagaaatgtaaaaaaaaccatacgcggctgccgcgtatggtttttttatgcgcccttttgatttggattagcgtcttgttttttgccaaataaaccttcaatgacaggattggatcccgcgtttttaacgaacagcggattcaggatgaccacagcgatcatgttggcggccaatccccagaatccttcataaatgccatgtgcggattgagtgatatacacaataaacgttaccgctaggccggctaataatccgataaccgttgcttctttcgtttggtttttccagaacaggctgacagcaatcgcagggaagatttgcaccataccggatacacctaatagctgaagtgtcactaaggcagtcgggaacagcattccaaacagcagcgcaagaccgatgacaacaaacaccattgaacgtgtgacaagagtcagcttgctttgcgacacattcggatgaatcaaatcccggtataggttgttggcgaataaattcgatgcgccgattgccataatggaacaaggtattaatgaagcaagagcgatagtggcatatgcaaagccttgtgccacgccgccgtaagatgtttgaatcaaatgcagcagcgccagccttggatttgtatcttccggcagaacaagaaaggcgataaagccaagaaaaataaccaaaattaacacgatattataaagcggcaaaaacatgctgttttttcttactgcatcagcgcttttcgccgtgaaaacacctgtagcggcatgtgcccacataaaaagtgccagagcggaaacaatagatgctgtgataaaccaaggaatgccttttggcccttctgacggtatcgtcagcatttgcggcgcttccttcactaacgtgtcaatcattggcgtccagccgttaaaatgaatgagagggagggacaccaccataaacagcataatgacccatactaaaatgtccttaatgatggctgtatatgtgggccctttaatcccgctgaagaatgtgtaaagagcaacaagaataaatgaaatgatcacaacgaattttacgttaatatagccagtgccggcaacctgaagcgtgtcttgaatgccgctcagctgaaggcatatgtacggaataagcatgagtaccccaacgatggcaacgaggcttgccaaaagcttactgttaaaacgttcccgggcataatccgcgagtgttgttaatttatgaattttcgcaactttccaaagttttggcaagaagaagtaggcgataaagtaggccaacacagaataaggaatggcgaaaaatgcaacacttccgcctgtaaaagcagtactggtcaaccctaagaaagtataggccgtataaaggtcagcgcctactaaaaaccagacgagaagaccgccgaagcgtctgccgccgacagaccattcttccacagaagtacgtgaggatttgtctcttccggcgagaaagccgatacagacaacggttaaaacaataatagcagtaatgagaagtgcagtcagattcccttgcattattcaagtcctccatcttttttttgcatctgataaatgccaaacgagcataacggcgtaacaataatccacagcagcagccaaaagtggaaaaacggcaggccgaacataatcggttctattcgattcacaagcggcaaaagcgcgagctgaacgaatggcaaaagaatgagaataacaataagtgcttttttaaccatttactttcctcctgaaacatgataatgctcactataatagcagttgtaagaaaagatcacaagataattattagaaaaaaatgattttttcaattatttaatcaaaacacatggtttgcatccttttcaataaaggtttaaaataataaatatcttgaaatcgagataaataggagtgagaaaatgaaaacagaaggattgcaccatgtcacagcattcgccagagatccgcaagaaaacttgcgattttatacagaagtgcttgggctcaggctcgttaaaaaaacagtaaactttgatgatcccggaacgtatcatttttactttgggaatcaaaacggagatcccggtacaataatgaccttttttccgttccaaggaagcggacagggaacggtaggaaaaggccaagcgggccgggtgtacttttcagttccctcaggctccctgtctttttggaaggaacgtcttgagaaaagcgggctgagcctagaggaaaaaacgttgtttggtgaaaaaggtcttatttttgatgatacagaagaccttccgctggcgatcatggaggatgcgaaaagcggcaaaagcgagtggacgcctgacgggatcacaacaaatgaagcaattacgggaatgaaaggtgtgctgctatattcctacgacccgcaggcgaccatacaattgttaacggaaagctttggatacaccaaagtggccgaagaagaccagattgtcagactggcatcttcagcggcggtcggcggtgtcattgatgtccatttacatcctgaaaaaagaggagtcggaggatatggtacggtacaccatgtagcgtttcggactaagaaaaaggaacaggcgaaatggctgccgattattgctgaaaaccatctgccttcgtcagaaattctcgacagggaatactttacatcagtttattttagggagaaaggcggtatcttatttgaaattgccacagatgaaccgggctttatgacagatgaaacgtttgctgagctagggacttccttaaaactgcctgaatggctggagaaacatagacaacaaattacagacattttacctgaactttaaaagggggaatttataatgaagcatatttatgagaaaggaacatctgacaacgtacttttgctgttgcatggcacgggtggtaatgaacacgatctgctttcattggggcggtttatagaccctgatgcccatttgcttggtgtcagaggatcggtgcttgaaaatggaatgccgcgatttttcaaacgtctgagtgaaggagtttttgatgaaaaggatcttgtggtgcggacaagagaattgaaagattttatcgacgaggctgcagaaacgcatcagtttaatcgcggccgagtgattgcagtcggttattcaaacggcgcaaacattgcggcaagcctgctttttcattataaagatgtgttaaaaggggctattctgcatcatccaatggttccgattcggggtatcgagctgcctgatatggcggggctccctgtttttatcggtgccgggaaatacgatcctctttgcacgaaggaagaatcagaagagctttaccgctatttgcgtgacagcggggcatcagcctccgtttactggcaggacgggggccatcagctgactcagcatgaagctgaacaggctcgtgaatggtacaaagaggcgattgtataaaaaaaccttagtccggatttcggactaaggtttttcatatccttacagccaagttgatacttttgaaagcggcagacggttgctttgatgcgcaggcttcactgctttgccgattgaaataagcataaccggaacatagcgctcactgatatcaaattgcttttggaactgctctttgttaaatccgccgattgcgcaagtgtcataaccttttgcttttgcggcaatcataagctgcatagcagctaaagaagcatttaagaaagcggaatcacgtgcgaattgctcgctttggtaagcaccgttgatttggccgagcaatgtttgtttgatttcatccgtaatatagccttggcttgctaattcagcataaacttcttcaccgttttcatttgcctttaaatcgcctaaaatggcaacaacagcagaagactcaacgatttgtttttgattatacgctacaggaagaagctccgcttttgattcatcgctgtggaatactgtaaaatgccaatgctgaaggttccaagcagaaggcgctttagtggcaaggtctaatagctcagtcagctcctccttagagatcggggcatttgtatcatattcctttacagatgcacgtgcttttaaaacatccagagtattcgtcatagtgtttcctccttcggataaacgtggtatgataatagaaaagttagaagcttactaaatgtaacttgaaagattattgtaatggatcattgaatacatgtcaatcaatagatgaagggatgaagacttatgggaaatacgatgtgccctaaaatggaatccgcattctcattgctgggaaaacgatggaacggtctgatcatccatgtgctaatggatgggccgaaacggtttaaagagataacggaaacaataccgatgatcagccaaaaaatgttggcagagcgcttgaaggagcttgaacaaaacgagattgtcgaacggcaggttctccctgaaacgccggtcaaagtcatctacacgctgactgaaaaaggaacagcgcttcaagctgtatttcaagaaatgcaggcatgggccgatcaattttgcgagcctggtgacacagtgtgtgaagaagagaaataaggaaagcggcacctgaaaaagagcctttgtttccatggtgagtcatgtaagtacggttcacacccgtttacatgactttttatatttgtcagactgatatttccggattggcaaaaatgtcatgtgcatatgaaggggatatataaaataggaaatgatcaataagctataacatccaacctattgtaaatggggattatgatgtatcttattatgcaaatcagcaaaattttatattttcagccaaaacccagtcagcttccaattggcatttaaaccggatataaaaggagatccaggtttttcgtattgctggatgcttctatactgatgacttccgcatttatgaaaaaagagagagcttctttggagctctctcttcttttttttgtggggagacgaaatcttatagttttccattcaaaaattgcgcctcaccgagaccgaaactccagtctgcgtcaccattctcagtaatagataccatgaggtcgtcaggggaaatttcgcattttttttctagcctttcagcaagcagagcatacaatttttccttttggctttcggttcttgctttgcttgtcatgctaatgatgaccatatccttggttctctgaaaccctaatcccgcatcctggattataagctcgtttgcgggatgctgatggacaatttgataacggtctctttccggaacaccaaatgcttcaaccatcgcttggtgagcagtatctaataacaattgcagcgatttttcatcacggccctcaattacatcaaaacgcaataatggcatgtgtactcctcctcttatgaagttgttatccgtctgttctcatattgtctcatttgcttccagacaatggagagatataatgattggcagtcaactttaaaaaacataacatataaccaaaagttaatcaacatataactaataaatcattgggttaggcggtaggtaatcgagacaagctcataaaaacgattgacagtcattgattaggagattagtatgaacatattagttgatcaaaagataacaatcatataaccaagacgtttttagttattaatgaaagcgctttctgttcatctaggcatgaaaagcgccaaaacattgtcgcgagaatcatataaaacacttttggaggggtaccatgccgattttaattgtagctgtcggagtgctgattctgttatttctcattattaaagtaaaattaaatacctttgtctcactgattgtcgtttcatttttagtagccatcggacttggaatggatatcaataaaattgttctttcaattgagactggaattggcgggcagctggggcatttagctttagtgtttggacttggcgcgatgcttgggaggcttgtctcagatgctgggggcggctaccggatcgccattacgctgattgacaaattcgggaggaaacgaatacaggcggcggttgtggttgcctcttttatcatcgggattgccctattttttgaagtcggtcttgttctgttgataccgattgtttacgcgattgctaaagaattaaaaatgccttttctgtatctgggaatcccgatggccgccgccttaaatgttactcacggatttttgcccccgcatcctgctccaactgctatctcagttgcatatggtgcccatattggccaggtgctgctttttggaatcatcatcgctgttccgacaactgtgattgccgggcctttatttaataaatttgcgatgaaacggtttcctggtgcgtatcaaaagcatggaaacctatcggggttaggaccaaggaaagaatttcagctggatgaaacaccgggctttgcgatcagtgctgtcacgtctttattcccggttatctttatggcaatggcaacaattttttctttattattgagtgaacattcaaaaggaaaagacattatagaatttatcggcactccgggaacggcaatgctcatttcgctgttgcttgcactctatacgatgggatatgcccgtaaaatatctatgcaggaaatcggcagatctatttcagaatcaatttcgcaaattgcgatgatgctgctcatcataggagggggaggagcgtttaaacaggtgctgattgacggcggagtcggcgattatgtcgctgattttttccgtcaaacaaacatgtcgccgctattcgttgcatggaccatcgccgcggttctgcgtctgtgtctaggctctgctaccgtggctgcgcttaccacagcgggaatggcagctccgcttatggaggctggcagtgtaaaccctgcgttaatggtgcttgcaacaggagccggcagtgtcattgcgtgtcatgtaaatgatgcaggattttggatggtaaaggaatttttcggcttgagcatgaaagaaacatttcaaacctggacgctgcttacaacagttctttcggttacagggctcggctgtgtgttattggcagggcttgtgatgtaacaatcatagacagtccgtagcccaatcgtttttcttccttgctgaatactttacgtataggcagacataaaggaggaaaaaatcatgtaccctcatcattcgtatttacgcggaatcccaggtccagccggatatccggcgcgtagtccttttttgtttggcgctcctctagtcggcggtttattaggcggttttctcgggagtgcgctgtttaactattctcgtccctatgcctatcctcctggcccttatggatatggaggcggaccgtacggttttggtgccggcgtgccatacgggggatatcccggcttctattaataaaaaacggcctgcatcgattgcaggccgttttttatcggatgatttctacctcggacatattgtagtcttgctgcttttgaaacatgacttccagaaggccatccttatagacggcttttgttcctttgcgtttgactaaacaaggaaggtttacttttttcggatgatctgctcttgggaggttttccaaccataattcgtgagatgtgtgtttgattctcacttgttccagccattcttcgctgattggcacctttacaaacacatggtctgctgtttcgaatatatcaatatcaggtttgacatcaggttttgcatcaggtttggcgggatgttctttttgggggagaggatcgcggaaaggaaattgagccgcataatcactgccgaacacactttccatcacacgattgacatacgtttcaacttctttcggatcagctttttttaatgcttctttagaaaattgattgtggaaaggaaagtacttgttccactcaaacattgtcttcacatcctttcttcacggacaaaatagtatatgcccaccagatctttcacgtgatataatataagatgctctaaagaaaggcagggatatcaatgcaacatgcagaaacaaaaaaaggcgttatttacacagccgtttcatttatcatgtggggcctgtttccgctctattggaagcttctcgaacagctgccggctcttgatattttggctcatcgtattatatggtcttttgtttttatgtgtatcgtactttttttcttgcggcaatggaaaataggatggcaggagttgcgctctctgaaaaagaacggagggatcctctctttatttcttgcttctatcctgatttcgatcaactggtttgtatacatatgggctgtcaaccatggctttttgcttgaggctagtcttggctattacattaatccgcttgtatcagtgctccttgggattttatttttaaaggaaaaactgaatcgcctgcaattagtggccgtttcgattgcggcagccggtgtcatcatctcggcgttccaatacggctccattccttatgttgcgcttctgctcgcattcagctttgggctgtacgggttaagcaaaaaaagaacaagcctgccgagcgccatcggtttaacgctggaaacattcatgattatgcccattgcattggggtatttgctgttcagcggacatgttcagccagcgggtgcagaaagcggagggacgtggctgcttctctttttggccggtgtgtttacggctttgccgctcttattgtttgcggaaggagcgaaacggctgccactgtatcaagtcggtatcttacaatatattgcgccgaccattaccctgctgatcgggctgtttgtttaccatgagccattttcaagctcgaaggcttttacattcagctgtatatgggctgcgctgctcttgtttacgttttcacaagtgaagtggaaacgggcgtcaaaaagccattgaggcctttggcttttcagctgatgcatatattatgtataatcatttcatgtatgtaagacataaaggagcaagacgatggacaatgataaagagatagtgaaagcctatgcttcactttggaataaccgatctctcgcacatgatgacgcagaagcggtagcagaggcgattgatcttgagctcttggataaacgaacacatccaagactccgaaaaccgatgctggaaaaatattttgccgcgattcagcgcattgtgaattcacagctcgaaccggctgtgaaatatcagctggtcaaattacatacagaacgtgcagagtatttaaaagaagaaagaggggagcaatcatgaaagcgatcataaaagaagatgtgcaagcatctttagaacgatatgcggaccgccctgtatatatccatttagaaaccaccacaggttcttattcagcgcacttaaatgaaaagaacatgacggttgttgcgtatattcgcaatgcaaaagtcacttatcatcaggcaaaaatcaaaggcaacgggccttaccgcgttggcttgaaaacagaagaaggctggatttatgctgaaggcttgactgaatacacggtagatgaagaaaaccgtttattaatggcgggacacctgccgggcggtaaactggctatttctctgcaaatcagcgaaaaaccgttcacagtttaaagaaaagggtgaataataatgaaagaacatgtactagtaatcctgcctcaccctgatgatgaatcatatggagtggcaggcctcattgccttaaacagaaaaaaagacattcccgttacgtatgcctgcgccactttaggtgaaatgggcagaaatatgggcgatccatttttcgcgaatcgggaaacgttgccgctgctaagaaaacaagagctcatcaacgcttgcaaagaaatggatatcaatgaccttcggatgcttggactccgtgacaaaacgctcgaatttgaagacgatgagtatttagctgatatcatggaagagatcatagatgatgtaaaaccaagtttaattgtcacattttatcccggacacggtgtgcaccctgaccatgatgcatgcggggaagcggttatccgtgcattataccgcaaaaagaaagaagaccgtccgcgtacaatctgcatggccattacccgcaacagagaagaggttctcggcgaagctgatgtcgtacttgatatcaaagaagtagctgatattaaaatgaatgcgttaagagctcaccgcacacaaacagaaggcatgctcagagagcttgaagagaaattgaaaaataatgaacctgttatggcaacatggtttgaagaagaaatatattggacgtatcaatggaatgattaatcaaaaaggtataaggccttaagccttataccttttttaattttaagtccgatgcaatagctgaagcgagagtggatctcaaggaaataccttcgaaagacaaacctagctgaaccgctgtttgcgcgatttccggacggattccagacaaagttgaagaaacaccgattaaacgaagcgcctcaatcagactgaacagctgatgggcaaccatcgtatcaatcacagctactcctgacaaatcaatatacagttgtgtcaccttttttttcgcacattgatgcagtgtgttttccataatcagcttggcgcggactgtatcaatatctccgattaaaggcagcagtccgacgctgtgaaacagcacgatgaccggagcgctcaattcagtaatcatatctttttgggcctgaagctgaaggcttgtgtttttgtacatttcttctataaaaatatgaatcacaagatcaaacgcttttataagggcgtgatacaggtcttcggcttcttcgcttttcacagtattctgattgagatggacaaattctttcacataagaaacatataaatctctcactctgacaaactcccgaataatatagtggataggagtttttaaatgctcttgatcctgtgtgacttcaaaggcccattctttcagtataggcaagtatacgtcctcatcatctataaaaatacggtttattttatagttaaaggcaagattctggctctttaaattgtgaatgacaacagggtctgttgaggcataaatggaattgggatcagtctcctcgattgtttcataccatgttgaactgatggtttccgcatgctgggaaagatactcgaataattttttgttttttgccatgattgatcacctcttttaaatgtgttgtttttgcgaataacgtttttgcagttttgccagcctgaaaaacagcccaactgctccggcggcgagtcccgctattaatccaatccaatagccgaatgcaccgaggcttgtaaacgtaccgaccatataaccgaccggaaggccaatgacccagtaagagacaaaagcggccgcaagcgtatagttcacatctttgtaccctctgagtgctccctggatcggtgcggcaacagcatcggaaagctgaaaaaatagcgcataaattaaaaagtgctgtgtcagccggagcacatcggggtcagaagtgtacatgcccgcaatttgctctctgaataaaaggatacaggcggcagtgaacaaagaaaagccgatcgccatcatgatgccgattaagctatatgagcgtgcatccttaaaacgggctgcacccgcttcaaatccgacaacaattgttagagccatggacacgctaagcggcagcatatataaaagagacgcaaaattcatggctgcctggtgggacgcgatggtcactgtatgaaaatggctcatgagaagcgtgacagctgcgaaaatgctcgtttcaaaaaacacggcgaacccaataggcagcccgattttgagcaaatttttgcatgctttccaagagaacttatacatggtaagaaaaatcccgtattcagaaaacggtgcgtttttatgaataatgaaaaaactgatgatgcatatacaccagtaagttaacgcggatgccagtcccgcgcctacacctccaagtgccggcattccgaacttcccgaagataaatacataattcaatacaaaattgattggaagagaactgagtgtaatcatcatggtgactctcgtttttcctaatgagtcgatgaatgatctcaacacggtgtaaacaaataaagggaaaattcccagtgataaaaagcctaaaaagtgtttagcaatctgatgcacgtgaatatcaaggttcaatcggccaagaataaggtcaactgcagcatatccaatcactaaaacggcgatgctaagaagcgcggccacgtatacagcttgtaaaacagtaaagggaatcttctgttttttctctgcacctaataactgagcgacaatcggggtgaccgccattaatatacctgcaagtcctgtgtaaacaggggtccaaaggcttgagccaatggcgacaccagctaaatcagcggggctgactttccctgacatcacagtatctagaaaagtgatcagagaaagccccgcttgggtaatgaatatcggtattaaaatgtgcaagagctgtttgattttttcccgggcgttttgagtttctttcatacattgatctccgtttctttttcataacgagagaaattataacattttatgtataaaaagcaatgaacgccgggcctattctttttttgtcggtttcgtttttctaaacatttgggcataaataaaagaaagcgaaatcacgcctaaaaaggtgcaaatatactgaatgattctttcgatttccattctttacatccctcctttaccaatagaatgtgcatcaataagataagcattcgtgaaaagttggaaatttaaacaggagatgaaggctatgcgctatgagcagatatcagaaaatgcgttcaaggggaaaatacaggtgtacttagagcaaatattaggtgatgcatctctaatcttgaaaacgcttcacgaaaaagaccagtgtctcctttgtgaattagatgatttggggcacgtttttcaggacatgcaggggattgcatcctccttttatttgcaatcatacattgaggaatttacgccggcatttattgagctggccaaggcgattaaagccttatcggaacataagcatggagctttaattgtgattgaaagagcagacccggttgaacgttttattcaaaaaggcacctccctacacgccgagatcagctcttcattaattgaaagcatcttttttcccggaaaccctcttcatgacggcgctttattagtgagggaaaacaaactcgtgtcagcagccaatgtgctcccgctgacgacgaaggaagtggatatccatttgggaacccggcaccgggcggctcttggtatgtcgggctatacggatgcactggtgctcgtggtttcagaggaaacagggaagatgtcgtttgccaaagacggtgtattatatccgttaatttcaccaagaacgtaaaaataataaaaagggcctgattaagaatcctatcatgagacaaaatgactgaattcgcatctttattaaagcattcgcttcaagctgaatgctttttgtcttgaagacagggaatataaactggtagaaaagttatatatgatgaatattaattaagtgaaatactttacctgtttatgcatttatagtaccgtataaaatattacataaattctcaaaggaagggtgctgccgcatggctaatgtattaatgatcggtttccccggtgaagggcatattaatccctctatcggtgtgatgaaggagctgaaatcccggggagaaaacattacgtactacgcagtgaaggaatataaagaaaaaatcacagctcttgatatagagtttcgtgagtatcatgatttcagaggagattacttcgggaaaaacgcaaccggcgatgaagaaagagatttcacagaaatgctctgcgcttttttgaaagcctgtaaggatatcgcgactcatatttatgaggaagtcaaacatgaatcgtatgattatgtcatatatgatcaccatcttctcgcgggtaaagtcattgccaacatgctgaagctgccaagattttcattgtgtacaacctttgcgatgaatgaggaatttgcgaaggaaatgatgggagcgtacatgaaaggatcacttgaagattcgcctcattatgaatcataccagcagcttgcagaaacgttaaatgctgattttcaagcagagatcaagaagccatttgatgtttttttagctgatggtgacttgacaatcgtctttacatcaaggggatttcagccactggctgagcaatttggcgagcgatatgtatttgtcggtccttccattacagaaagagccggaaacaatgatttcccatttgatcagattgacaatgaaaacgtgctgtttatttcaatgggaaccatttttaataatcaaaagcagttttttaatcaatgccttgaagtgtgtaaggactttgacggtaaagttgtgctttccatcggcaagcatattaaaacaagtgagttaaacgacattccggagaatttcattgtacgcccgtatgtccctcagcttgagatcttgaaaagagccagcttatttgtgacccacggcggaatgaacagcacaagtgaaggtttgtattttgaaaccccgctcgttgtcattccgatgggaggcgaccaatttgttgtcgcagatcaggtagaaaaagtcggcgcaggaaaagtaattaaaaaggaagaattgtctgaaagcctactgaaagagacgatacaagaagtaatgaataatcgttcgtatgctgaaaaggcaaaagaaattggacaatcactgaaagcggcaggcggctctaaaaaagcagccgacagcattcttgaagctgtaaaacaaaaaactcaatcagcaaatgcatagtgtaaaagcctgttcttatcgaaagaacaggctttttgccatttcataagaatgcagaggaagggatttgacacgccgatagagaattgattagaaaaatagacaagaaaggaggagaaactgcttcgttcatcaatagaaaaccatcatttttaccctcgcttaaatagttccttagactttcgaaaaacatatcgtgcttatgtaaaatgttagatgtttatttgaaggtttaaaggtcgaacgatgctgaaaatgctgcgccaaatgtttgaaaagggtttaacttgctgaaaaattgacgataaaacagttgtgtgccatttttggaaacaaaatactagctgtttttgcaaaaaaacagtttaggaggttgaatgaatgaaaaagaagattgtagccggcttggctgtttctgcagttgttgggtcgtcgatggccgcagcacccgcggaagcaaaaacgataaaagtaaaaagcggtgactctctttggaaactttcccgccagtatgatacgacaatatcagctctgaaatccgaaaacaaattgaaatcaacggtgctttatgtcggacaaagtcttaaggttcctgaaagcagcaaaaaaagcacgacatccccatctaattcaagcaaaacatcaacatacacagttgcatatggtgattccctatggatgattgctaaaaatcataaaatgagtgtttctgagcttaaaagcttaaacagcctgagcagtgacctgattcgtccggggcaaaagcttaagatcaaagggacaagcagttcaagcggatcaaatggatcaaagaaaaacagcggttccaattcttcaggttcttcaaaaagtacatatacggtcaagcttggtgactcactgtggaaaatcgcaaacagcttaaatatgactgtagccgaattaaaaaccttaaatggcttaacatcagatacactttatcctaaacaggtgctcaaaataaaaggaagcagttcacctaagaacggaaacagcggttccaaaaagccgtcaaactccaatccctcaaaaacaacgacgtacaaggtaaaagcaggcgattcgctgtggaaaattgcaaatcggctcggagtcactgtccaaagcatccgtgataaaaacaatttatcatcggatgtgttgcaaatcgggcaggttctgactatttcgggagcatcaaaatctaatccttcaaatccgacaaagccaacaaagccaaaagataactcagggtcaaacattcaaataggttcgaagattgacagaatgataacggaagcgaaaaaatatgtcggagtgccttaccgatggggcggaaacacgcctgccggttttgattgcagcggcttcatttattacctcattaataatgtatcatctatatcaagattgagtacggcagggtattggaatgtcatgcagaaagtcagccagccgtcagtaggagactttgtcttctttaccacatataaatccggcccgtctcacatggggatttatctaggcggcggtgattttattcatgcaagctcatcgggcgtcgacatttccaatctcagcaattcgtattggaaacagcggtacttgggcgcaagaagttatttttaaaaatgagtatgacaaaaagccttttataggcttttttgtttataccagacaatgattgaccacactgttagaaaaaacaagggggagacagtatgcaccgtctcttgctgttgatgatgctgacggcactgggagttgccggatgcggacaaaaaaaacctccagaccctcctaaccgggtgccggaaaaaaaagtggttgaaacgtcagcgtttggtcatcatgtccagctggtcaatcgtgaagggaaagcagtcggttttatagagatcaaagaatcagatgatgaaggcctcgatattcatatttccgcaaacagcctgcgtccaggtgcttctctcggttttcatatttatgagaaaggttcttgtgtcaggccggattttgaatcagcgggcggtccctttaatccactgaacaaagaacacggctttaataatccgatggggcatcatgccggagatctgccgaaccttgaagtcggtgctgatggaaaggtagatgtcataatgaatgcgcctgacacttcactgaaaaaaggaagtaaactaaatattctcgacgaggacggaagtgcatttattattcatgaacaagcggacgattatctgacaaacccaagcggcaattccggtgcgcgtattgtctgcggagcccttttgggaaataacgagaagcagtaatatcatccaggcccttttgtattgagcatacaggggcttttttagtatactcgttaatggaatatgaataggaaagggaatctgtctatgacaactcaactacagcacttaacattgccggaagatatacaacaaaagcttttatcatataaagagcagcctatttccccagagtttcaatcgcttataggaacatcaggctatgaggcggaggatgaagccattttatttgacgccattattgcattagccatggggaaaaatgtcctgctgaaagggcctacaggttcaggaaaaacaaagctggcagaaacattgtccagctattttcataaaccgatgcacagcgtcaactgttcagtcgacttggacgctgaggcattggtcggttataaaacgattgaaaatcaatctggccaggcaacaatcgagtttgtttcaggacctgttacaaaggcaatgaaggaaggccattttctttatatagatgaaatcaatatggcgaagccggaaacactgcctattctaaacggtgtattagattacagaaaaatgatgacaaatccgtttacaggcgaggtcatacgggctaaaagcggtttcggagtcattgcagccatcaatgaaggctatgtcggaactgttcctctgaatgaagcgttgaaaaaccgttttgtcatcattgatgtgccttatattaaaggcgagctgctgaaacaagtgctcatgtctcagtcagccttgaaagacgagaaattgattgacagatttatcacgctttcctctgacttgatcgttcaggccaataacggacaggtgtctgaagaagcggcatccatcagagctttaatcgatacatgtgatttagctgcttatattccgccgcgtcgtgccattgagcggggaattgtagaaaagcttgatgatgatcgggaaaaagcggctgtccgaaatattgcagaaactctgtttgaatgagggggctgcgatgaaatttatcaaatttaacgacagcacgattgattcatttttatttatgatgctgactgatttggccaaaacactcaccaagagtgaagcggtagaagtggagtatggcgttcagtcctattacaatccatttgaaaagaaaatctatatgagccacttttggaaagacagggcagctgaggacatggaagcgggtctgaaaagcgacgtctacctgcgttcagtcggaacaagatatagctcgctgcatgagtttgcgaactttttgaatgatatccatcgccatcttacgtttaaaagttttgccaagcagctctttatgctgcttgaagacattaggatcgaagaatgcatcaaacgtgagcgcccgggtacgaaacatgtatttgcgaagcgaaaagacatgtacagaaaacatttctcaacccagctgaccttaaatttggaacgaagcatttttaccgatgcgctcttttgcgcgatctatttcaagctcacagcggaatcgccgctcgagacccttccatccatgcgtgaagatatcgatctgatgcgcccgtttattgagcagcagctcttgcgtgtgtatgaagcagattcgacacggcaggttctgaaaattgttgaggacctcatggacggacttgaagaggtactcgataaagacatgttgaacacctacttctttttgcctgagcttgattacgcaaaagctgcagaacagccgttatttgaagaagagaaaaaagcgccgaagctgagtgatgacatcacgcttccaaaacaatcagacggtgatgaggatatccatgaagaagaaatgccgacatggcaccgggaaacagaagcaccgtctaaaagcttccttcaatttgatattgaacacggcgcaaaatcagatttaggaaaagatgcttcaagggaaggcgacgatggagatcaggcccttggctctgttcaaggatcagccagacaaacgaaacggaaagactattccaagctggaagcgctggagtcccaaaaagaccagccgaacggagcgggtatggctgacggcaaagaaaataaatatgcatttccaatttataaagaaccgcagccggcaaccagtgaagaagagctttcttataaacagcaggcaaaaacgattgaatcgtatcaaaagcgtttgaaacaaatgattcaaaaaacgctggagcataaaaaaacattgccgagaacagaccttcatgccgggagactgaacaataagcttcttcgttacttcactgagcgaaatccgcgcctgttctacaaaaagcaagaaccatcttcagaaatcgacgcagtttttacattgctggtcgattgttccgccagcatgttcgacaaaatggacgaaacaaaacgaggaatcgtgctgtttcacgaagcgttgaaatcggtagcggttccgcatcagattgtcggtttttgggaggacacaaatgatgcaaccgaaaaaagccagccaaactatttcaatacggttattcccttccaatcatcattaagacaagattctggaccggccattatgcagcttgagccagaagaagataaccgtgacgggtacgcaattaggcagatgacgaaaaaaatgctgcatcgcagcgaggcgcaaaagttcttaattgttttctcagatggagagccggccgcatttggctacgaacaaaatgggatcgttgatacaagtgaggcggttatcgaagcccgaaaaagaggaatagaagtgataaatgtttttctctccaactcagaaatagaagaatcgcaaatgaagacgatccaggatatgtacggaaaattcagtatatttgtcccggatgttgatcagctaccggatgttttgtatccgctgctgaaaaaactgcttcataaaagcataggatagcccttaatcctatgctttttggcgtttgttttttcgaatgattaaattttttgttttttataaaggttttttactattttgtgaacaatcaaggtagaatcaaattgcaaacagtggtaaaatatcgttggaagcgtttttattacataattttggacacagcgttcgaaagttatttcaagatagtgaatcaatcacttgattatttaagttgggggtaatattcaaatgtttcaaaatagtatgaaacaacgaatgaattgggaagatttttacggtccgaacctcggctatgcgctggagctttacgatcagtatacccaggatccgaacagcattgacccggatttgaaggaaatgttcgacgagctcggtgctccgccaagcgatataaaagaggcctcgggaacaaaagaaaagggacgtgttacagccgatctgattcaaaagatcgcatccgcagtcagacttgcagaagatatccgaacctatggccatttgaacgcttccgtcaatccgctcagaaaggatgagaaaaagagcgaactttttccattatccgattacgggctaacagaagaggaaataaaagcaatacctgcgtctgtcatctgcaaagacgctcctaaaaacatttcgaacggtttagaagccattcagtatttacgaaatacgtataaaagaaccatctcttttgaatttgaccatgtgcatgacttcaaagagcgcgagtggctgacaagaaagattgaatctggcgagctgttccagaagaactcagctgaaaagctgtcagctgtgctggaaagattgacagaagtagagggctttgagcagtttttgcaccgcacattcgtcgggcagaagcgcttttccattgagggtctggacgctcttgttccagtgcttgatgacattattgcacaatctgtcaaatcaggcacgacaagtgtcaacatcgggatggcgcacaggggacgcctgaatgtcttggcacatgtgctcggcaaaccgtatgaaatcatcttctctgaattccagcatgcgccgaacaaagatcttgtaccgtctgagggatccattggaatcagctacggatggacgggggatgtcaaataccatttgggggcgaatcgggagcttcaagacgctgaaacaaaatcagcgcgcattacgttagcgaacaacccgagccacttggaatttatcaatccgattgttgaaggcagcacaagagcggcacaggaaacgcgaacacaaagcggatacccggtacaagatgaaacaaaatcgctggccattttaatccatggagacgctgcattccctggggaaggaattgtagctgaaacattgaatttaagctctttaaaagggtatcaagtaggcggtgcgattcatattatcgccaataacatgatcggattcacaacagaaagcgctgaatccagatcgacaaaatatgccagcgacctggccaagggttatgaaattccgattgttcacgtgaatgcggacgatcctgaagcttgtctttcagctgttaagtttgcggtcgaataccgaaaaacattcaacaaggattttctgattgatttgatcgggtacagacgctatggacacaacgaaatggatgaaccgtcaaccactcagccaatgctgtatgatgctgtcagaaagcatccgaccgtcaaacaaattttcgctgaaaagctggtaaaagaaggcgtggttaccgaggaagtcgttcaaaacatcgaaaaatcggtaacgaagcgcattgaggatgcatatcagaaagttccgtctaaaaaggaacacactgcttgtgaaattgaacttccagagcctgtatcaaacggtttcccagatgtggacacttcgattgattttgatgtgctccgcaagctgaatggcgaattgatcaactggccggagtcatttaatgttttcggcaagctaaagcgcattttagaaagacgcgccaaggcgttcgatgatgacagaaaagtggaatggtctttggcagaatcactcgcgtttgcttcaattttgaaagacggaacaccgattcgtttaacaggacaggattccgagcgcggaacgttcgcccaaagaaaccttgtgcttcatgacagtgagacgggcaaagaatttgtgccgcttcatcacttatctgactgcagcacatcatttgctgttcataacagcccgctgtctgaaggatcggttctcggttttgaatacggctataacgtgcattcaccggaaacgcttgttttgtgggaagcacagtacggagattttgccaacgctgctcaagtgtattttgaccaatttatttctgccggacgcgcgaaatggggccaaaaatccggattagtcatgctgctcccgcacggttacgagggacaggggcctgagcactcaagcggaagaattgagcgattcctgcagcttgcagcggaaaacaactggacggttgccaacctgacaagcgcggcacagtatttccatattttaagaagacaggctaaaatgctgcttcgtgaagaaatcagaccgctcgtcattatgacgccgaagagccttcttcgcaacccaaatacggtgtcggaagtgcaggagctcagcgaaagccgcttccagcctgtttatgaacagtcgggactttctcatgactatgaaaaagtaaccagacttgtattatccagcggtaaagtgtctatagacattagcgatcattttaataagttagaagacggtaaagagtggcttcacattgcgagaatcgaacagctgtatccattcccggcaaaaggagtcaaagaattatttgcaaaacttccgaacctgaaagaaatcgtttgggtgcaggaagagccgcagaacatgggggcttggggttatatcagcccgtatttgacagagattgcaccagagggagtaagcgttcaatatattggacgaagaagacgatccagccctgcagagggagatccgacagttcataaaaaagaacaggaacgtattgtatctgatagcttgactcgcaaaaactaagggggaaatgaaaaaatggcggaaattaaggtacctgaattagcagaatcaatctcagaaggaacaatagcccaatggttaaagcagcctggtgactatgtagaacagggtgaatatctgcttgaactagaaacggataaagtgaatgttgaattgacagcagaagaatcgggtgtacttcaagaggtattgaaagattcgggtgataccgtccaggtcggagaaattatcggtacgatttcagaaggcgcgggtgaaagttctgcccctgctcctacagagaaaacagaaagcaaggaaagcgtaaaagaagagaaacaggctgaaccagctgcacaagaggtgagcgaggaagcacaatctgaagcaaaatcaagaacgatcgcttctccgtcggcccgtaagcttgcgagagaaaaaggaattgacctgtctcaagttccaactggagatccgcttggaagagtgcgcaagcaggatgtcgaagcgtacgaaaaaccggcatcaaaaccggctcctcagcaaaagcagcagcctcaggctcaaaaagcacagcaaagctttgacaaacctgttgaagtgcaaaaaatgtcacgccgcagacaaacgattgcaaaacgccttgtagaggtacagcaaacatcagcgatgctgactacatttaatgaagtggacatgacggctgtcatgaatctcagaaaacgccgcaaagatcaattttttgagcaaaatgaagtgaagctcggctttatgtctttcttcacgaaagcggtcgtggctgcattgaaaaaatatccgctgttgaatgcagaaattcaaggcgatgagttgatcgttaaaaaattctacgatatcggaatcgctgttgctgctgatgaaggtcttgtcgttccggttgtacgggatgcggatcgcctgacatttgcaggaatcgaaaaagagatcggcgagcttgcgaaaaaagcaagaaacaataaattaacccttagcgagcttcagggaggctccttcacgattacaaacggagggactttcggttcattgatgtcaactccaattttaaacagcccgcaagtcggtatactgggcatgcataagattcagctgcgccctgtagccattgatgaagagcgtttcgaaaaccgtccgatgatgtatatcgctttatcttatgatcaccgaattgtagacggtaaagaagcggttggtttcctcgtgacaatcaaaaatttactggaagatcctgaacagcttttattagaaggataataaaaaagggtacatcacgataaagtgatgtaccctttttgatgcatatttaaagtgatagattgctgcttttggatccagcttgcttctttttcactttttttgaccaatatgttgcaagcatagaacctgaaaggttatgccacacactgaatattgcgcttggtacggcagatagcggtgagaaatgagccgtggcaagtgcagccccaagcccggagttttgcatgccgacttcgattgcaatcgctttttgagacgggtaatccatttttaaaagctttgcacaaagaaaccccagtaaataaccgataccgttatgcaggataacaactgaaaaaatgagcaaccccgattgaagcagattttcccgattgccgctgacgacagctgagacaatcgcaacgatgccaatgacagaaacaagcggaagggcatgtacggcttttgccacttgttttctgaaaaacattttgacaatcagacctgcaatgatcggaaataaaaccgcctgtaagattgagataaacaaagaccccggcgagacaggaagccattctttggcaaacagcataatcaacaacggtgttacaacaggtgccaataaggtagaaattgtcgtaaccgcaacagaaagggcagtatttccttttgctaagaatgtcataacattagatgcagttcccccgggacagcagccgacaagaataacaccaactgcgatttcagctggaagatgaagcccaaatgcgaggccgaaagcaacgagcggcatgatcgtatactgagctattactccaataataacttgccaaggctttctgaccagctctttgaaatcatcggcttgcagtgtaaggcccatcccaaacatgataatgccgagaaaaatcgtaatataagaactgatccacgtaaataaagatgggaaagaaaatcccagcactgcaaaaacaatgacccatatgccaaaggtttgtcctgcaaaatggcttatttttctaatgatgtccataaaaacactcctaacacacttatcaagaacttcagcagaaattcttacaaatttcataacattctcttattataaataattttctgaataattcaatattagtttttggcagatgtctatagatatatgatgtaaactaattaaaatgttcttgactatataggaagatattcttacaatgaacctttataatggttagatcaaataggagtgatacggtgaaggaagcaaatcaatggtcttcgaagctcggctttattttagccgcggcaggatcagctatcgggcttggtgcgatatggaaattcccatatgttgccggaaccagcggaggaggcgcatttttacttatttttattttatttacggttttaatcggactgcctttattgttaggtgaattcatcataggcagaagaacacagaaagatgccgttcagtcctataaaacacttgctccaggaacgaagtggcattggatcggttatttaggcatggtgacgtgctttattcttctatctttctacagtgtcgtaggcggatggattttaatttatattataaaaggcttcactggcggtttatcgcaaacatctggttttgatacgatatttgcaagtaccatttcaaatccttatttggctgtaggaggccagctgctctttatggtggtaacaattttagttgttgcaaaaggggtaagcagcggaattgaaaaagcaagccaagtattaatgccggcgctttttctattattcatcattttaatggtgcgttcggttacacttgatggcgcgatggaaggaatcaaatttttcctcatgcctgatttaactgcaattgatgccaataccattttatatgcaatgggacaatcctttttcttattaagtgtcggtgtatctgtcatggtaacgtatagcgcttatttagagaaacaggaaaatctggtacagtccgctgtatctgtaactgttatgaacatgcttgttgctgtaatggccggaattgcgatttttccagctgtattttcattcggcctcaagccagaccaaggcccggttctgttatttaacgttctgccgactgtgtttaatcaaatgccgttcggaattatctttttattagcatttttacttctatttttatttgctgcattgacatctgctttttcaatgctggaaattttggtcgcagtactgtcgaaaggcgatatcaataagagaaaacgattcgcttggttaggcggtattgctatttttattgtcggtgtgccgtctgcattatcatacggtgtcttaagtgacgtcactatatttcatctgtctatttttgatgcggctgactatcttgtgagcaatattttaatgccgttaggtgcgttactgatttcgatttttgttccgctaaaaataccgaaacaggatttgtttgacgagctgaaaagcggttccaatctcaaacgaaagtggtttgcggtttggctgctgctcattcgatatctatctcctgttgccatcatcatcgtgtttttgcatgtgataggtattttttaacacacgaagcccccgaggaaagggggctttttttaatagagcttccaaacgacttcttttgcctgctcaaaacgtttttcagcctcgcgccaatccacgacattccaccagtgatcgacatagctggcccggtcatttttgtattgcaaatagtaggcatgctcccatacgtcaagcggtaaaagggggatcacatcccattggctaaagagctggtgtttttctgccgttaaaatctccagccgtcctgatcgaggtgcccagaccagaatggcccagccgacgccttccacttttttagaggcctgggtaaaatgttctttaaaagcggaatagcttccaaatgaaaggtctatcatttggaacaatgcccctgtaggacgccgttttccgtttggatgcatagaaaaccaaaaaatactatgcaaataatggcctgctccatggaacgcaagctctctttcccaatgagtgattaagtcataattctttgtcgctctcgcttttttaagctctgattctgctttgttcaggccatcgacatagctttgatgatgttttgtatgatgaaggatcataatatcgcgtgatatataaggttctaaggcggagtatttgtaaggaagctttggcagcacgtgtttccctatagggacataagcgcgtctttcacttgtatcatctgattctgtaatatcccgataaagggcagcggcctgtttataccaatcttcttctgttgtttggtcatcttccagagcctcaatcatcttgtcgatttgatcttcaaactggtcaagctgacctcgcttttgaatctgatctttcagggcttcacaccaattgaacatctccgcttgataagattcacgtttcatttgctgtctccttttcaatagaatctaaatacttcccgacagccagcaaagagaatacatatggataactgtgatagcgaatataaaattgcttcggcaatccgatccctgctggatacgcgaggctatcggcgctatgcgaactgctgtcggtaaggtattgcatgcctttcacaacagacggatgttcggaattttcatatgtgagcaaagcgtctaaagcccaggccgtttgtacaatggttcctctatgaagcggtacatatgttttgatttcggcgcttttgcaggattctccccagcttccgtcatcattttgtatggatttgagccaacgcagagccttttgtataccgggatgctttcggtcaaccccgcatgcatgcataccagtaagagcagcccaagtgccgtaaatgtagcaaacaccccatctgccgtaccaagacccattttgttcctgatgttcgaaaagccacttcactgcgcgttgaatatgttgatgtttttctgtgaagccaactttctcgcctaaaaagtgcagtacacgtccggtgaggtcggcggttgaagggtcaactgcagcgtcctcggcggattcaagcggcagaaggcggatcagtggatggttcacatttttttcgaaagcagaaaatccgccgtcattgttttgcatcgataaaagccaagataccccccgctcccatgctgcaggagaatgattgcggggaatcgcctttaaaacggctgtagtgtcgtcacagtcagggttatttgtattaatgtttgaaaacccccagccgccaggaactgaatttggatttttgacagaccaatctgctattttggtatgctggcgttctagcaaaaagtcggctgcttttgtaacagagccatccgtttcggtcacaccatttttttgaagggcatagcttattaaagctgtatcccaaacagttgaagtagagttttccagataaggaatcccgttgcatttagtcaccagtgatttaatgccggtaatcgccctcctgataataggagaatagcgtgacacaccaagtgacagaaggctgtaaaccatatatatggttgcgctcgcatagctgtataatgttccatctttttcaatccggtccagcatatacgttttagctgtctgtaggcccagctgctgaaaagcaaatggtgcatgaaaaacgcgtttccaatgtaacaaaatagacgtgagatctctttcttcgaaagcatcagaccgaagccaagtgaaaggattttttgtcatgtgcggatcgagatggtgaagagatgaaatattgcggttaataaggacaaatcgctgattgagtgttacagccataggagcaaaatgaatacgggcatatgagctgaactgatagaaatgaatcggcaatgttggggggagcgccatgagtgataatggtaaatacaaagcaggccaaggataaagcccgttcgcggcaagcatccattttgtcataaaatgaacatgtctcaaaccgccatgtgagatgataaattgttcagctttcttcatgtgcggctcagttctgtgaaaacatcctgaagccagcatcccgacatatccttggacggtagccgttagatttccgcgcgtttcatcgggatagttgataaatgtgccgtctggctgctgttttgcatgaatgccggctgcaagggatgatatcagttctttttcattttcgccttcatctagtgaggtaaggagcaaaataaaaaaggaatttgtcatgattggtccttcaaagcaaaatgtccatgaaccatcagcattttgcctgtctcttaactcggtaatggttttcttttgaaaacgcctcactttctcctgaagtgtgcccatcacgctcaactccttcagaagcatatatattcagcgtcttttactgccattacagaaagaaaaaaactgctggcaggcagcagttttttaaacatacatgttagtcttcaaggtttacccatacacttttgacttctgtgtaattatccaaggcatatgatcccatttctcgtccgagtcctgactgtttataaccgccaaatggagacgccgcgtcaaacacattatagcagttgacccaaacggttccggcttgaagtcggtccgcgatatagtgagcctgcttgacgttctctgtccatagtccggctgcaagcccatattctgaatggtttgcccgttcaataacttcatcgactgtttcgtacggaattgcagtcagcacgggtccgaaaatttcttcttttgcgatggtcatttcgtcttcaacattcgcaaacacagtcggtgcgacaaaatatcctgcttcaaaaggacagcttccgccggtcactgcttttgctccttcatcttttcctttttgaatataggaaagaacgcgctcatgctgttccttgcttacgagaggcccgatttgagtatctttatgaagtcccgctccttggcggagtgactcagcataggatgccatttcatcaacaacttcatcatattggtctttatgaatgaagacacgtgagcccgcacagcagacttggccctggttaaacatcacaccgtttaaagcgcccgggatggctttttttaaattcgcatccggcagaagaatattaggcgattttccgcccagctccaatgtcacacgcttaatgcttttcgctgcggtggacatgattttctttccgatttcagtggaaccggtaaaggcaattttatcaaccgcttcgtggttcgtcagcgcttctcccgcatcttcaccgaatcctgggatgatgttgattacaccggcagggaaaccggcttggtcaattaattctgccaaataaagagctgaaagcggtgtttgttcagccggtttgaggacgattgtacagcctgttgcaagtgccgcgcccattttccacatcgccatcaggagcgggaaattccatggaatgatctggccgacgacaccgacaggctcatgacgcgtataattaaaataagcgccggaaaccggaatcgtctgtcctgttatttttgtacaccagccggcgtaatagcgcatatgctcaatagccagcggaatatctccattagtcgtttcattgatcggtttcccattatcaagtgtttcaagctgagcaagctcagttttatgctcttccattaagtctgccagcttatacatcagtctgcttctcgaagctggagacattgttctccattcaccttggtcaaaggctttccgggcagctttaacagctttgtccacatccgcagcctgggcttcatacagcgtcatcaaggtttcgccggtcgccgggtttggagtgtcaaaggttgcccctgaggcactcggaacaaactttccgtcaatataaagcttctttgttccctgtaaaaatgtctccagccttttcgtcacttgcatcgttaaagaactcatccgtaacaaacctccagtcattttttatggtctgttctgagattcttggtgatagcacattgattcctggattgaatagcagaaataagctgtgatagttgcttcaaacgtaagcgtatacaaacattctataatagaaatcaaggcaaaatcaatgaataaccgatattgcaatttacaaaagaaaaaagctacaataagcttatagataagaaaaggagatttcatcatgattcataaaaattggcttgaaaaagaaaccattaaaaaagtaaagtgtgtgcagacaaacgcaaaaaaatatatcgtaaaccgcgttttaacgccgggaaaagaatatgaagtaaaaaatgaaacagaggagtttctctttgtggtcgacaatacgaataaagtcggcggctattataaagaatacttcgaagagatgtaatgcttccttgaagcatcaaacagattttgttaaaagcagtcgatacataaaaccgcagctcagctgcggtttttttgtggttaaaacaggaaatataaaacaaaattaaaaaaatcattaaaaaccacttttttataaaaacattgctgaatattgaaacttttttctctatatgtgcgtattacttgatgacaacagcttaaaagccaaaaaacaaatcaaaaatttgaaaaatgtaatctgttcgtaatggtttaaatgtcttctatgtcgtattcttatatagggataaaggacttatttttatgtagtgaatgataaaacaaatagataaatgcagaaagaggggttcttcattgggtattttttctgttagcagatcaacggacgcaaagaagcttgaggctttgctcgttgaaggggaaagaattgaatcgatttataagctccgagtggaccaaatttgctttacaaataagcggatcattttctttgacaataaaatgttttctaaaaagaaggttcgtgtatttcttccatataaaacaattgaaagctttgccatccaagaagcgggaatgtttgatccggacactgggcttttattgatgacaagaagcaaaactttcgaattagaatttgcgaaagacaccgatttaagcgaggttcaggcggtgctgacaaagcatttgtgcagctgaatatttgatgagccagccgttcaaaaaatggttaggctttttttatatataaaaacaagaacagggcatgtgcgccctgttcttattacaccacactgtttttcgctgagttcgaatcaacaagatctgcatctaatacatttgaaatcggcacgacaagaggagtaaagtcgccattttcttctccaaacccttgatttattttagctgataaaaagtaatcgacctgctgatacggaccgagtgttaaagaggaacctcgatccatcgtattgattttaaatccgccgacatttacgacggagggtgaaaagaacatctcatcacttccttttgattgaggagttaaccgcttcactttcaaaagaggccggagaatcaatttggtctctgtcatccacatggcttctcgtgcccataaatccgctcgcatctccaaaattctgtccgtagccttgattttttttatctgaattttgccattctgccaataaattttgtcctacgttaaccgctgaagcattttcaaaggaattaattttcagcatgaaaatattaatattgatatacggagttggttgaaccacaggcaaacctcctttctatagttgtatgctggcggttataaagtatgttaagacagggggcttcaaatggatttcgaaaagatgaagcagtggatggaattcgcacagcagatgtacggcggtgacttttggaaacaggtatttgatgaagaccaaaaaaccccttttatgacaaatggccaatctccgtttccgtttgcgcagcaagatcagcgagggaaaggagatgcttcatttccgagcatggatattgtagataccgttgcggaagtgcagtttttaatttatcttccaggctaccgtaaacaagacgttcacatattatcgtacggagattatttagtggtgaaggggcagcgcttttcctattttaatgaacaggactttcgccaaaaagaagggaaatacggaagttttgaaaagaaaattccgctttccgatcatcttcatggaaagatgaatgccatttttaaagacggaatcctatacatcactattcaaaaagacgaaggtcaagcgaaaaccattgttattgatgattgattttcatactgagtgcatctgacacatcacggtcatcaattgattcaatcggaatgaccataacaataccatctgcattttgttccccaaaaccgttatttcttttgatagcagagcacctgttccttaactccgcagaaccaaaggtaagggatgagccggtgcctatcgagttagtcttgagatgagaaatattgatgttagtcggaagcatgaaaacctctcctttctatgggatatacctcattatatatgtagacgaaagaggagtatgcaaagggtcgtgatgtcatgaaaaaaatgttccggtcgctgatcaggcattgcttgaaaccagaacttgacaaactgcgtgaatgtgaagaaagactctcagtgattgagaaacaaaaacaaagcagcaaacaagagtctgaagaaacctatatacatattgaaacgctgaatgtcgaaaaagttgactatcatcttgaattcggcgagctgaccattgatgaactgagcggcagattaaatataggcgcaacctattatataccgccagaagagaaggacaaaaagtgccaacgaaaacccgaagcaccatcgacgccagcggtcacgatccgttcaaaaaggcagtagctcatctttccatcgatgtttccatgtttgacagaaggcaaaacgggaaacaggatagaaaggagaggatatacatggcactgacaaaagaacaaacacagcatctctatcataaattgctcgatatgcaaaaagaattgtctggcgagaaaaaggaaacagaatcaatgacggaagaagtgggggagctttccaatggggttgacaaccatatggcagaccacgggacgctcgtcacagaccggatgacagaccaaacagtgaaagagattgaccgggagctgttagaggaggtcaaccgtgcattacaaaagatgaaagacggaacttatggcgtgtgtgaaaaaaccggccaagagattccttacgaaagacttgaagctgttccttatgcaagaatgacagttgaggcccaagctgatgtggaggatgatctggagacagatgctccttcttatgaaagagagtttcatgaacaggtaaaagacttatccaacaaagaaacaattgatcaaaaaagctcgcagacgtatgaaatcttggatcgtgaacaagattcgaagtaaaaatgccaagcaagtacaccgatattagatgtacttgcttttttttgaaaaaaaatctcatattcaaaataaagtgattgactttacgtaaaaaagaaagtaacatactatttgtaagtaaatataaaaagtttaccgggaggaatacaaatgtctacagttttatttgtaaaatcaagcgaccgtacagctgaagaaggcgtttcaactaaactttacgaagctttcttagctgcttataaagaaaacaaccctaatgatgaagtggttgaattagatcttcataaggaaaaccttccttaccttggcagagatatgattaacggaacatttaaagcaggtcaaggaatggaaatgacagaagatgagaaaaaacaagcagcaattgctgacaaatatctgaaccagtttgtaaaagctgacaaagttgttttcgcattcccgctttggaacttcacagtgccagcagtgcttcatacttatgttgattatctgtctcgcgcaggcgttacattcaaatacacacaagaaggaccagtcggtttaatgggcggcaaaaaagttgcgcttcttaacgctcgcggcggtgtctactcagaaggaccaatggctgcacttgaaatgtcattaaacttcatgaaaacagttcttggtttctggggtgttcaagacttgcacacagttgtcatcgaaggacataacgcagcacctgatcaagcgcaagaaatcgttgaaaaaggtttacaagaagcaaaagatcttgctgcaaaattctaataaagccaagactcctatcgttacaaataggagtctttttgtatatacacattaatatagaagaaaataatcattcgcttttagcaataaaggctattttttttattgtaatatattttttgtttgtcgaattgtcaggtattttggagaaaaaacagttttattcactggaaaaagtttttctaaacaattgttctgacctcttgattaaaagcgcctgatggtgtactatattaaagaagctactttgtgcgtattgttaattaagttttaacctttaagctgtaatagggagttttatatcgaagccggaatgtcatgcctccattgcagaggacgactggaacgtttctgcaaacacccactttgaggagtggtggtttaaaactttcttacttgcatacggcaagacgtagcgaaagccatttccttttcggaaatggctttttattttatctaaaaaggtttggtatagtgaatattccatttttgtgtgaaagaaatgaaggccgcttttttatgatatgatgggagaaattcaaggaaaagcgaggtttacacgttatgttacatagagcccaatcccttctggctcattattttggttatgagaagtttcggagcggccaagatgaagcgatccgcttggtgacggaagcgaggcaaaatacggcctgcattatgccgacgggaggcggcaaatcgatttgctatcagattccggcattaatgtttgaagggacgacgatcgtcatttcaccgttgatttccttgatgaaggatcaagttgatgcgttagaagaagcggggattaacgccgcctacattaacagcacacaatccaatcaggaaatatatgagaggctgaacggactcaaagaaggggcttataagcttttttacattacaccagagcgactaacgtccatagagtttatccggattttgcagggcatagatgttcctttggtcgcaatagacgaggcgcattgtatttctcaatggggccatgatttcaggccaagctacaggaatattgaaatcttgttccgtgaattacacgacaagcctgtcatcatggcgttaacagcaacagccacacccgaggttcatgatgatatttgcaaacagctgcatattcaaaaagaaaacacggtatataccggattttcccgagagaatttaacctttaaagtagtaaaaggagaaaataaagatcggtttatagacgaatatgtgcaaaacaacaggcatgaagcaggaattgtctatacagcgaccagaaaagaagctgatcggatatatgagagattgaaacgaaatcaggtcagggcaggccggtatcatggaggtttggctgatgatgtgagaaaagagcagcaggaaagatttcttaatgatgagcttcaagtgatggtggcaacctctgcttttggaatgggtattgataaatcaaatatcagatttgttctgcatgcacaaatcccgaaagatatggaaagctattatcaagaggcaggacgagctggacgggacggtcttgccagtgaatgtgttctcctgttttcaccgcaggatattatggtgcagcgcttcttaattgagcaatcagaacatgaagagaaacaaaagcaggatttaaaaaagctgagacaaatggtcgactactgtcatacggaagattgtctgcagcgttttatccttatgtatttcggagaaaaggagcctgatgcgtgcggacagtgcggaaactgtaccgatacaagagcggcccatgacgtgacgcgggaggcgcaaatggtcttatcttgtatcattcgcatgaaagaacggtttggcaagacgatggttgcccaggtgcttgccggctccaaaaataaaaaagttcttgaaaacggcttttccgacctttcaacatacgggatattaaaacaccaatccgttggcgaaatcagtgattttatcgaatttcttatttctgacgacttcatcaggatgtcagacggaacgtttccgactctttttgtcagcagtaaaggaaggaatgtgctgaaaggagaattatcagtagcgagaaaagaagcgttaaaagcggcagcgattactgaaaatgacgagctatttgaacgattgcgcatggttcggaaagaaattgcggctgagcagggtgttccgccatttgttgttttctctgaccaaacgttaaaagaaatgtcaggaaaacagcccgtaaatgatgatgaacttttgtctataaaaggagtcggagaacaaaaaagagcaaaatacggccggctttttttacaagaaatacaggcttatgcaaggatgacagactaaaaaaacagaaaaacaatctttttttctataaaaaacacattttattttctctgtttcgcctcaaaataaaaagacctgcgaagcctattatatcaagggttcagcaagtctttccatcagagagaaatccttcatgtaaaggaactgtaatctaaatcatatctttttgttattgatttgacatttacgtgtgttacgatatcacctgttagccgccaataaaaagctaacaagggaggatttacttatgaagaagacgattatgtcctttgtggcagttgctgcactttcaacaactgcattcggagctcacgcttctgcaaaagaaattacggtgcaaaagggtgatacgctctggggaatctctcagaaaaatggagtgaacctaaaggacttaaaagaatggaacaagttaacttctgataaaatcattgcaggagaaaaactgaccatttcttcagaagaaacaaccacgactgggcaatatacaattaaagcgggagatacgctttctaagattgctcaaaaattcggcacgacagtcaacaacctgaaagtttggaataacttaagctctgacatgatctatgctggatcaactctttcagtaaaaggtcaggcaacagcagcaaacacagctactgagaatgcgcaaacaaacgcacctcaagctgcgccaaaacaagaggctgtgcaaaaagagcaacctaaacaagaagctgtacaacagcaacctaaacaagaaacaaaggctgaggcagaaacttctgttaacacagaggagaaggctgttcaatcaaatacaaataatcaagaagcttcaaaagaactaacagttactgctactgcttacactgctaacgacggcggcatttccggcgttacagctacaggcattgacttaaataagaacccgaacgcgaaagttattgcggttgatcctaatgtaattccgctaggttctaaagtctatgttgaaggctacggggaagcaacagcagcagacactggcggcgctattaaaggaaataaaatcgacgtatttgtaccaagtaaaagtgatgcttctaattggggcgtcaaaactgtaagtgttaaagtcttaaactaataatatagattgtgataaaagacataagcttttggcttgtgtctttttttgttctgcttagagctgtttatatcatatgctgataaaagaaagtggtcccgtttttctttatgtgcgattcaggggctctcgggttaaaagattgattccacattacagagacattcggcatcatgacatttatagctggttgttactatctttgatcagcgaaacgagctggtgtttttggcagataataagcagttggatgtagcagataccatttacggaatcggattgatttcagacggttttttattgtgatattaggctcttgcagttgggcatggcagcttcgggagcgaagtggcacaactttgtcatactgaaaatacaatataatcaatatcagaaattctgctgatgtgcaatggccgaccattttaacagggatatcattcaatccagtcttttattgggctgttaaccaaacaatcgttcagcgggcgtaggagcgaggatatggatcaatttaattctggttgcgacgaggttctcaaacgggaatttcaggttaacaaaaaggatcctggcagatgccaagatccttttttatttaaaccagcctttttcttttgaccgggtaatggcttcaattcgatttttcacttcaagcttttctagaatcattgagatataattccgcaccgtcccgcttttgatgctgagttcctgagcgatttcttttgtgtttttaccgtcagccacaagttcgagcacttctttttctctatctgtaagagggttagcttcgctgtataagtcctccatcagttcaggtgcatagatgcgttttccgttcatgacgctacggatggcgttggccagctcttcactcggactgtcttttaacaaatagcctttaacgccagctttaatagctctctgaaagtaaccgggtctggcgaaggtggttaagatgataattttgcagcctgtatcttttagctcctcagcagcttcaagccctgtttttccgggcatttcaatgtccataatacatacatcaggctggcgttttttgacaaaatcaacagcatcttggccggttgtacctttgcctacgacttccatatcgtcttcgaggtttagaagtgatcctaaagcgcccagcagcatttgctgatcttctgcaataaatatactaatcatataagccatcctttatgtttattttgaattattaggaattgccatggtaagcttggtcccgttttcggtatcgatgtgaaggcttccgtttgcaaactcaagccgttctctcatcccgagtaagccatgtccttttgaaaaggaattttcttctcctttgaatgttccatcgtcagacactgtaatcacaacttctttccagagctgctgaatgtcaactcggcaagttttagcctggctgtgtttgacgacatttgtgacagcttcctttaagcacatgctcaaaatgttttcattcagcaatgagatattctcgggccatttctcttcttcatagataaacataatgtcagctgcttcgagaatttgtttgatgttgatcaattcatccttgagccggatgcccttcatagaggaaacgatttttcttacttcatttaaagaagttcgcgctgtttgctgaacacttttcagttcacgagctgcttgttcgggatctttgtatatcaattttcttgctaagtcgctttttaaaccaataagagaaagcttttgcccaagcgtatcatggagatcgcgggcaattcgctgacgttcttctaattttaccagttctgcaatccgttcatttgcatcctcgagcttttcttcaagtcgttcgcgctccttgcggctttttatactgaagggcaataaaattgcgctgatgagggtaataacgacaaaaggaatttgtgtcagaaagaattccttttttaatacgagactgaaattggctgcgacggccgcgcttattaaatggacataatataaaatatgaaaagggacgcgttccttaatgtttccaataaaataagcaataaagaaagcaaaataaatataactgaacagagtaatggaggcggttgaaatgccaattaataaaaatccccacaaataaatggtccagccttttgagacaaaagcaaatcgatataccgaaaaaaataaaagcgtcaaaatgatgccgacaataataacaaatgtagatgatgatttccatataaagtagaaggggaggatgaaaaatatcgtccatatatagggcgtaatcccgtttagtttttgaaatgtaaaatgatttttaatcatgatcttacctcattttcagcttttcatcttacttgtaactttatcattgtgaaagccagaatgcaccctccaacaataaaaaggaagccttctagtatattagaagacctcctttatcatcaggcattcttccgcagcttctgtttttctggtgaatcaggcggaaggcttacaggtatatgttttatagcccgaaatgacacaaactgtttgttatcttcatcccatagacggaacgcaagtgattgcaggcttgtttttaaggtgattgtcggtacgttttttaatggttcgtgatgttcatgagcaacttcaagcttatagttaggcacctttggactcaaatgatgaacgtggtggtaaccaatattgcctgttagccattgaagcagtttcgggagtttataaaatgagctgccttcaacagcagcctgaacgtagctccagttttcatccgcttcaaaataagaatcttcaaaggtatgctgcacataaaacagccaaacaccgattgaacctgaaatcagaaatatcgggccttgcaccagtaaaaacgattgccagccaaagatcagacagcaagcggcagccaacgcgacaattgccagattcgtaaggtatgtgtttacacgttccttgcgtcttgcgccttttttgttaaaacggttcgtgatcagaaaaacataaatcggtccgagaataaacatgataaacgggtttctataaagtctgtatgcaagctttgttcgtctggatgcagctttatattcgtttactgttaacatccagatgtctcctgttccgcgtttatccagattgctgctagttgcatgatgaatcgaatggctgtgctgccattgaagatacgggaataaagtcaggacacctgtcagaaaaccgagaatgtggttatagcgtttttgtttgaaaaaagattgatggcagcagtcatggaagatgataaaaattcttgtcagaaaacctgcggcaatcaccgttaatgctaacgtaagaagataggagacatcgaggctgagataagcaagaaaccataggccgaagaatgggataaacgtgtttaaaagctgaatcaggctgttttttgtttcaggctgagcaaatgcagcgacttgctttgtcagctgtttttgtttatgtgcaatggtttgttcagtcatagtaagtatcctctcattgtgtgtctcggttcagtatacgctaatgagagaagtcttttgtagtagcacacatcatgcctcctatatgacatttgtcatgtctcgtgcggcatgcatagccgattgcgctaaaaaagcttgtaaaaaaatttacaagctgattaatgtttatcaatccatattcgtgatgtacccgaaatagcttcaatcctgcatgttcctcctatagggaacgtggcaattggcgaggtatgtccggcatttatatttgcgatgatcgggatgccggataattctttttttgtttcgatcatggcttttacaagatctattgatacgtttgatgctttctgaaatctgccgatcaaaatcgcctttacatgtgaaaaagcggggaggtggatgagtgattgcagatcgcggtcaaacatatggatgtctgacatataatcatcttcaatcaataaaatagtatgttctgtttcgggaaaatactccgttccctgcagcaaattaagcgtgcataagtttccgccaattaaagtaccttccgcataaccttcttggattacaacagggccgttattaggataaaaacgcctgttttcttgatccaaaaaccagcgatcatcgctccactcacttgaggggtgaatttcaaacggatcgtctgaagcgcagcaagaaagaaaatactcctctgtataatcgagtccttttttcattgcaaatgttgagaagtggggacctgaatacgtaacaagacccgttttttgataaatagcgttgcaaagagcggttatatcggaataaccgcacagaatttttggatgtcgtttgattttctcgtaatcaagataacgcagcagctgatttgaattaaaccctccgagtgtcgttaaaatcgctttgacgcctggatcaaaaaaggcagcgtgcagatcatggactcttgactcgatagaggatgaatcaaattcgttacattcatttgcgtgttcagcgatggttacccgataacctaagcgttctaacgccgtttttgcttggatttttgcttcatttgataatatagacatgctggtcgcgggagacacgatccggatttcgtctccctttttcagttttgaggcgtacatagaaccctccatcaatggttttataccattacagcatatcttggctctttcttccagacttttttacaaatcaacccacttaatgctgccggattgggtatcatgatcgatacatactttgaagtgatgtttttcataaaagtgaatcagccggtctacatgattccaatcccgtttggcgatgtctccggtgactttcggtatattatggtctcttgcaatatcttttaaatatttcatgcaaatggagccaaacccgtgattcggagggccttttatatcccctatatgaatggcatcgtccttgtaagacgctacaagtgaaaaacagccttttcctcggtatgccgttttacaatcagttagcataattttgcatgtttggccatcatcaatcgaggaaacaatcatccactcatcatgtttcgattgatcaataccaagcactttggcatctttagataaatccttcatattctcctgcatgcgataaatttgaaattctaaatcatttagttcttcctcaagctcttgacgatttttttctttaacagtaaacaagatcaaactcctttcaaaaaacagcttagaaacacagttaccaattgtattagaagagaggcgtattgtaaacaacaattccattattactagaaattagcggaaagtcaggtttgatcgtttttaagagaggaaaaagaaaactaacctgtgaaaaaggaggaatcggaatggcgattgattcattgattaacaaattacagtatgtccaattggaaccgccggataaaattctctctctgtatctcaatacagacatgagagatccagagcagcaggggggagaatggaagattgccctaaagtcaggattcagccgattaaaagagtatttggcagctagtgatccagaggaggaaaagtgtctggatggaatcagggctaaaatgaatcaatacttgaatgcaatgggaaaagacatgccccgcagtctcgtgttttttgtttccgacagcggcatatgggaacctattaagcttcaagtccctgtagatacaagattttactgggaagaaacagctgtcctggatcagctaaagggtttgcgccagacatacccaagtacggcgtttattttaactcagcagcatgaagtgaaaattattgaaactgttttaggaaaaattgaggcggtggagcgttatgagtatgatatgatcaatgagtcttggaagaatagccattccgctgtagacaaagcgccaccatttgaagagaaccggatgagggaacatgtaacagagaaccaatcgagactgtataagcggctggctgccagccttgatcaaaaagctgccgcgaaaagatgggaacgaatggttattgccggggataaagaaacggccgatatcttggatcagcatatgaataaacccattcattcgaaaattcaaaagaacctgctgaatgaaaatgaacataaggtcattgaacatttgataaaagaggcgtaaacctaacaggccggggctaatagcctccggcctttgaagtgtgtctaatttctgacgaagcaatcgaaaccgttgacatcttctttgaatttgcatacgatttggatagccagtacaaattaggagaggtcaccaaatgaaccaaacagaaaataaaccgaaaaattacacggggattgtccttacgctgacagttctgattaacggtttaatcgcagtgctgttttttatgcctaaattagatcagttcagccatgcgaatattcacattttgccaatgctgaatgcgatattcaatagctttacgtttatcttcttattggccgcgctgattatgattaaacagaaaaatatcaaagctcacaaacgctttattttggctgcgttcacaacaacattactatttttgatttgctatgtgacgtaccactcgattgcggaaaacacgctctatggcggagaaggtattatgcgcccgatttatttctttattttaattacacatatctgcctttctgcaattattgtgccgcttgcgctgtttacgctgatcagaggcttcagcatgcaggtggagcgccataaaaaaattgcgagatggacaatgcctctatggctgtatgtaagccttacaggcgttattgtatatttgatgatttcaccgtattattaaaagccatactcagtatggctttttttacgtgtaaacatggcaaaagcccaaattcatttttgggcttttgtcagtaaattgatagactcttattcatgagccttggattccatggtttcaagtgttgcaacctgcaaagattcttcaacagtttttgttttttcttttactttttctgcatacgtataatcaccgtagcaatacggatagcggaaatttttcgcatttcccccgcaagtatacagatcaggattttttttgacttgctgctcggagtattgttttgccaattcctcagtatgcgttcctccatgttcagctacaaaatcaatgtaacctgcccccatgttgtagctttgaataatggtatccaaatccacgcctttttccttaccggtcttgtacatgagggtaaattgcttgatgccttgtttaacactgagttgagggtctgttatctcattgcgttttaaccccagagattcagaggactgcatgggatcattgccttttccttttgactcctgatacatcatgcctaatatgagtgatgtataattagagagtccttggctttcaagctcttcttccaccaagggtttgtaatcggttaaacgttccaaaacaatcgttttcgtatcgatcggaagttttttgattaaatcccggttgaaaaaaagcaggaccaataaaaaagaggcgatgacaaagacaaaaatcatcataaaacccgcagcagcgaaacagccttttctctttttcttcactgtgtttcaccctcaatgtttggagcagtatgaccttttttattatgacataagagggtatatcagaccaagtaaaaacctgatttgaaacataaatttaaactatgagattgaaatggaatacaagcaggctggtttgcactcaagcgcatttgttataagataaaactatgaataaagaaaggtgatacatatgactgaatttagagaaacggaacaatcggctgctgatctggacgaggagacgctgtttctagtcgcgcaaacattcaaagcgctttcagatcctacccgaatcagaattctccatttattgtcccaaggtgagcatgcagtaaacggaattgcagaaaagctgaatttactgcaatccactgtgtcccaccagcttagatttttaaaaaatctccggcttgtcaaatcgcgcagagaaggaacatcgatttattactctccggaggatgaacatgttttagatgttcttcagcaaatgatccatcatacacagcatgattgaaaaagacatccttgcttaactcgctgttagcgggcaaggatgtctttttctttattgtattcgtgctgttcaagttcgtttctgctgagcttgatgataaaagaagaaaaaccgatataataaacggctatcagaaaacagacgccaattgtcagagggtccgttccgattgactgactgtatgatccaaggcggtttagatcaggtgaggtaagataaagctccgtcactcgatacagaaatcttgatagaaataaagttaagagaatcacctctacccaaatatgagtccgaaaatagatctttcctctgcgtttttcaaaagagatgtttttcttagcgaaaaagacaaggagccatccgccaagaatgcccaaaatgagatatccatataaaaaagggtgaatggcgctgaagattgaaagtccaaaagcaaacagcgagaaaagaatgatacgggtgaacagccagcggggcttcagcggctggtatccgatggaccttttaatttttttatacagaaaaaagatgatgattatggcaggataaacgctctgaagtgtaagatgcatgatgtgaaatcccctccgttgagaagtgtatgcttatccggtcggaaatagtagctgaaataaatactgaacacaaaaaagaaggggaaacccctgttttcatagcatatgcgaggtgtattccgccgcataatagatatgcccaagctttatcaaaatgttatgattgttttgttggaaaatacaagaagaaaaggtgcgcagaatgaaactggaacgtttgttagcgatggttgtgttattgatcagcaaaaaacaagtgcaggctgcagagcttgctgagctgtttgaagtatctgtcagaacaatttaccgtgatattgagacgatcaatagggctggtattccgattgtgacctcacagggttccgggggcggaattggcatcatggaaacgtatcggcttgaaagagagtggctgaaggaggaggaattgtttgcaattgcttccgctttgcaaagcgtttcatctatgtatgaacccgtttctcacagcacagcctatcaaaaaatcaaacaccttatacctgagcaatctactcaagcatttaagcaccaaacagaaaaatggtttattgacatgacggcttggggccatactgaggatcaaaagacgctgcgcgagaaaatcagcgctgccatcgatcggttgttaacgatatcttttacatatacaagcgcaagcggggaaacactacttcgggaaactgaaccttatacattggtttgcaaggcggggcactggtatttatatgcctactgcctggtaagaaatgattttcgcttttttaaactgaaccggatgaaagatctggccatcttacatcagacatttatcagaaaagacattcagctggacactttgccatgggataagagttggtaccaaaaggaccgtttaactgaattggttattcttgttcagccgtcagcacgtcagcgtataggtgaatggttcggatatgatgtccttcactgttgtgaggaagatgaaatctgccaggcggtgatttcacttccagaagatcaatggctgatcggttttttgctccagttcggaaaggatattgaggttctgcagcctcttcatataagggataaagtaaaagaaaccattcatcacatgcaaaaaatatatgaaacctgacacactgctgtcaggtttctttgtctataatcttaaaaaaaggaggagatcgtatgggcttttcacatataacacacttagacctgaaacgatttgccggactatcacaacggacaagcaacgcactggaaatgacggaagaaaggaggattccggcactgtgggatcaattatggaagcaggatatgagcgctcttttatcacaggctgaaaaagacaagagcattattgccttatattcgaattatgaacaagagacgaatgggttttatacgttttcagtcggaacgtttcaggaatacgacgacattcttccgggaccatatgaaaatattgatttgccggcttccgcttacgccgttttcacttccagaatcggtcctattgaagagattgtgcttgaaacgtggaaggaaatttggacttgggataagcggcatctgcgcacgtttacaggtgactttgagatgtatgatcaaaatgccgcagtgccacagcgagcacaagttaacatttatgtagcgataaaaaaataataaactcttgaaaaactaatggtgttagttaataataaaactaacaccattagtttttgttaggaggaataaaaagatgagaattactcagtaccaaacggtttggcagctgactttttttccagcattgtttccggttaattgctatttagtagaggaagaaaacgaagtcacccttattgatgccgcactgccaggcagctataaagggattattcaagctgtgaatcagcttggaaaaccgcttcagcatattttactgactcatgcacatggggaccatgtcggatcactggatacattggcacaaacatttccgcatgcaaaggtcatgatctcggaacgggattcattcttgctccaaggtgacacatctttgcggcaagatgagccgcagacgcctataaaaggaggtattccgaaacacatacaaacaaagcctcaccaactgctgacgggcggtgaaacaattggttctctgcttgccattccaacaccgggccatacaccgggcagcatgtcatttcttgatacaagaaacggcactttaatagcaggagatgcgtttcagttgcgcggaggaatcgctgtatcaggtcagataaaatgggcgtttccttttcccgctttcgccacatggaataaggaggaggccatcaaaagtgcacaattgctcgccgataaggcgccttcctgtctcgctgtcggacatggaaaattcctgcgatcaccttcagagcggatgagacaggcgatccaaaaagcaaagaaaggatgatgagcatgtcaccgagaataggtttgacccaaaaaatgattgtagacgctgcagcagagattgccgatcaggaaggggtaaatggtgtctcacttgctgcactttctaaaaaaatgaatgttcgccccccgtcattgtataaccatatcaacgggctgcaagcgatcagagcagaacttgctgtcagaggactgacaaagctttttgatcaaatggcggactccgtaaccgaacgaaagggagattccgcgatgctttctttagctcatgcatatgttgattttgcaattgaaaatcccggatattatgaagcggctcttcttaaggttcacgacaaacggacggaaatcgtctctgaccaaattgtctgtcttgtgacgaagctgctcattgaaaacggctatgcaagtgaaaagactgccattcatgcgacaagggggctcagaagtctgctgcatggctttactgttttaatcgcaaaagaagcatttgaacgtgaggaggacattttagaaagcctgtcattttcaattcggacatttttgtcaggattattaataaacaataaaaatattatgtaaacaaataaatggatgtcttatatttctgaatattgtataatatcaagggagtatacataggggagaggcattatgcaatggatgacattcgcaagattgaacgattagcggcagcttcatggccggcttattttcaaaaaagcatagggaaatggcttctcagagcgaattttggcgtaaccaaaagggcaaatagcgtatggacgtctgcggatatgcctgaaggggattttcagctagaggccgaacttttttatcaaagtttaggcttacctgtttgttttcatattagcaacgcatcaccgaaagggcttgatgacgcattggcagacagccgttatgaaaaggtagacgagtgcttccagatgacagcgttgtgccggtcaattatgagccgaacaaatgacaacagccgatttacatacaagtgggaacaagagccatcatctgtttggatagatgaatttattcaattagaagggttttcacccgagcgtcacaaaggttacaaacacatattcgaacgcatgccgccgtgtaaaacttttttcaagatgtatgacaaagaaagcctgacagcgcttggcacggtttctgtcattgatggttatggcggacttagtaatatcgttgtagctgaggagcacagaggaaaaggggcaggaacccaagtgatcagggtgttgactgaatgggcaaaaaacaacggagcggaacgcatgtttttacaagtgatgaaagaaaatctggcggcagtttctttatatggaaaaatcggcttttcgcctatatcggaacaccattaccggattaaaagatgaccaaaggaaggggtttgctaatggactcgcttcaagagataatttgcgaaaaacggacatacacacggctatatcattcacataagcacgcgtacagccaatttctttttccgcttgaagggagtattgatcttgagactgaggggcgccaggtgaaattaaatccggatcattttttatatattccgccgcagtgcgagcatcgcttccgttctatcggaagaaatgaatgtcttgtactggatgttccgcttcatgcaatgaaaattgatgagtatcgtgcaggatcaggaattgaagctgccctcgatcctttctggtcttcgatcaggtacttgctgacagaggaagcaaaggccggaacagccaactcgcttcatatgctagtacaatacataaaagaaaagcttcaatcccatagctatgcctcaattgcatacattcacagccatttatttgagcggctgacgattaagaagctggcagaaatcgagcattatcacccagcttactattcaagctggttcaaaaaacagacagggaagtccccgcagaactatattgccgaccttcgccttgaggaagcaaaaagaatgctgatggagagaaatgaaactcttaccgtcgtgagcgaggcgctgggctttcaaaacctttcttcttttacaagatggttcacgaaaagcacaggaatgccgccccgcctgtatcgaaacaccttatattcggataaaaaatgatggctctttagttaaaagaatattgtatatctcctttacaataggagaaaaaggagttattgatatggcagttattgatgactttgagaaattggatatcagaacgggaacaattgtaaaagcggaagaatttcctgaagcaagagtaccggcaatcaagcttgtgatagattttgggactgaaatcggcataaaacaatcgagcgcacaaatcacgaagcgttacaagccggaaggtctcatcaacaagcaagtcatagcagtcgtgaactttccgccccgccggatcgccggatttaaatcggaagtcttggtcctcggcggcatacccggccagggcgacgtcgtccttttgcagccggatcagcctgtcccaaacggcacaaaaatcggataacgcaaaaaaagacgtttgcctaaggcaaacgtctttgcgtattgaggcgatgcaccacacgccacattcgtgtgtgccgtaaaggcatgtacatcggcttacacaattcagctcatcgctatatgaatatagcatggagggcgaaggaatgcaaggattacttttagtaacggtgaaatgaatttagaatggaaagggttttcattttatttgtaagaaaaaactcagtgagatttaggtgtgatcttaatgcagtttgtatcgacttacagatgataaaagaacaatacttttaataagcctcatgaaacattttcaatttgtaaatacttaaaggatatatatggtgtatttgctatagaagtctaatatgatatccatttactcatttcaatagcaactttcatgaataacgagaaggaacagctgtcaaaatttttttgattataatataagttaattacgatagtatattaggggtattttggtagatattgaaaattgataataacatacaaggaataaagaacctagaaaagagatctaattatttggataaacatatattgaactggtcggcgtatccactatttgatgacggttagagcgataccataccctttttctgatgtgtaagcagaggttattttcattactttccagcttccttcagtggcttttgttcctattccattatgtgccgtaagataatctccttgattgacagtttcgtcaatacgcacataatgttggccaaccaaccctacaacgtgccattcgtctcttgctgcccgtgaatgataatttgcctccagcgctgtatcgtagtctggattttgtttgggaacacgtatgagttcaccgctttcctcatcagtcaccgtttcataaataaatccgccgaactcatttgtcaaataacggccctgccagacgaaactggaggctcctgaaatgaaagctgaagtttctgaaataacgccaagcatataatctccaacattcgcgggcacaattttttcacctcttaaagtcacgattgtaccagtatggattaactgtccagttgaactctcaaaatactctccatatccacctaaagaagaactgattgcaccggcaaacgtcccgtttccccgaacagagtcaagaagccactttattgattgatgacctcctgccacggtgtatggttcctcaagtataatattttcagaagacagtattgttcttgacgcttggtttcctctaatatgtgcgttatttgaagaagcgattaatgcgcgagagccttcagtactggagcctccagaagagctaatgaccgcatttctttctccgcgggccgtaatgtcgccggtacctgctataactgcgcttgtttggttaacggcaaagccagaggtcgttgcaagctgtatgcctcctttcaaattgattggaacttgttggtatgtttggcctttgattgaggctgccacactataaccttctgattgtacaccgagaattgtggcctgattattgggggactgaattgcaactgtcccattgtcagtaatcatcgttccatttagaatattgacattgtagaggcctccaccgattgaaattccttttggagcagatttataaatatcaaaatttgaaattttaatataatcagttttatttgatccgcctgataaattaatatcaacaccggcttttttaaaaccgcgaattttaataccattaatggttatattttggctgcgatattgcaaggctacgacagggttttctttataatcatagtctggatcaccaatcgctgtgaatccgcttacattaacgtttttatatgccgaaataaccagcgctcttggggtcacagcatcgtaaagcgagttgaaaactggttcaactgctgaacaatcaatgagtgtgacatcgtatgctgttgtgctttcaggatctgtaatttgatggtgaccaatatgacgaagatcaaatgcacgaacatcgcgataagaaatatggcctatgatatggacgttttgagaggctggccacagttcatgggcttttacttcaactccgcggatgttgccgcttgtaaagttattcaaaagccacacatgcctagagccgtcgtcaatttctattccgttggagtttgaaacaccttcagcaaattctgttccccgcggatttcctgaatggcagtttgaaataaagatgtattcgctataatgggtggtaatgccgtcgtctcctgaaccatatgtcacacagttatcgatccaaatatatcttgatccgtcttttgtccaatcggtatcaggcaaatggtcatacgttggcgatgtaatatcaataccatgaagacctgcgttaatcgcttccacatctttgatccacccatattcaaccttagcaaaagttaaacaactggagaactgtccccctggatttctcacaccgcattgtctacttggattccagtctaatgacattccttggacaaaaatattgcgatttccattttgataatcatcatttgtaatcacccattcatgcgctggagtgtcttcatgcaatttaatcactgtgatccctttaccttgtccaacaattgttgtccaagatggaagtttaatcccttgaacgaggtattctcccgctggaacatgtactttgactcggccattcccgattgcttttcgaaaagcttcagtattgtctcttccatctggaacagcgccgaagtcagccacatttacttcccgggtgattttagataaaagcctataatattccttgtcgagacgttcttttaaaagagaggtgacctctccttcggccgtcacccttgcgtcagtaacttcgatattttggtctgtaaccgagtgcttaataaagttttgcattcttgtcttaatatgttctaattcggatgaaaattcggggtgagactgagaattggcgtttagagaaggatcagggcagtttttaaaatgaaccattctaaagacacctctttcttttaatataagcgcagttttgtctttgagataaggagttagcatttcttttggcgcttctctttccaattctgtatttgttacaaaattcctttaggatttatactggttttcaagaaatgtaagtcaatgaaaaaaagagaggacaagtaaaggataaaaagcaacattaagaatcgttatacagtgaaagaaagttcgcccgatggttaattaaaacgtttcctatggttgggtatttattaatgattatggaagaaaagggaggtccgcattcaaaacgtgtataaagataataaagaaccgaatgttgagacatcccatatttgaattaatcttttaaacaaaggagtataaattcttcacttctttttatatcaaccagttttaacaagatgtgagcatgatctaaggtaagcgattgacctcataagcaacacgtattccagattcaatcgcgccttgcatccacgcatgagtgagtgaggcgtgttctccggcgaaatgaactctgccctcagggacaggaatatagggatacagctctaattcttgtcctggttcgaaagctgtaaaacctcccgcagaatacgggtactggctccagctaaaagaagtgccagacacaaattcagaccacacaatatcaccatagatttcagataaattcagtaaagtatactggattcgctctccttctgaaagactgtcccatatcagtgcctcatcggcccatgtatagctggccagaatgacagcatgtccatttgctccaatatttctgcttggataatatgaaaaacgaatcggaagatcagtaatagatttgccgccgtgctgaccggctttttcccaaaatcggcttttaaactctatgccgatttttgttgcactgatatagtttagctcacggatggccctccgtttatagtaagagaatgaatggtatggttcgacttttacaaatcgcaatgttgaaaaaggaatggttacaatagcgagatcagctgtgaatgatgtgaattctgccgtttgttgatgctgacaatggatcgtaacacgattttcaccctgagacattttcatcattttttgatggtatagaatgtttgtttttaattgaggaagaaacgcgtgaggcagcagatccataccgccagttatctcatagaagtgagcgggggatgaaaaaaagatagattcccgcaatacttcaacaagggacatccccatatacgcttccatatccaaaagtacaccgatcatatcgatcgcgccatatgaaaaatacgtgtttaaaaaagagcttaacgaatgatttttgtattgttcttcgacaatccgccaatttcttgctggattttgattgataaaatttagaataggctgcagtaaagaaagcatcagctcttcagacgttttcccttgttcatttggtgcaactggatatctcaatattccaggagctcgttcaaaaacttggagacgtgttttgattccatttgcataaatgatgtccatcggggttctgttgataaatacatttgttggcaatttgaattttttgatatattctaaggttaacgaatggttattcggtatgcgcatcgggccagcgttgaaatacaaatcatcactaaagggagatctcaaagtgcagacacggccgcccgctctgccgctcgcttcgagaatcgttactctgtgaccggcatttttcaacaaagatgctgatacaagcccggacaatccagctcctataacaagaatgtgctttggatgctgcgatgcgctaaggccatttctaatgatctttaccatgtcatcattcattagagaattcaatttttggaggcacctctttttagaatttattgcattatattcactgaaaagagcacctatcacgatctgttcacatcttttggaatttgaaaggttattgttaaaaggaaataaaggggtgatgtatgtgactaactttgttcataagactgtaaatggcttgaaaagtcttttagacgaaaaaggagccattaaattgttttgttcagaaggtgatatcatggagttccttgttactttttcacaggacaaagcaaccctgaatgacattcaaagctttgaggctaaacaccagcttacccttccacaggattatcagaagttcatgacactacataacggtgcgaaaatttttgagattctttctgatggggagaatataggtggaggacttcagctatttagccttgaagagattgaagaggagttaaaatatgaagatttgtttgaagatatcaatggtattccaattggctacttattggaagaatgccatttaatgatcgataaagataaagtgaaccaaggtgatcccaactatctctatatatttgaaagtggtttagaatataatccattaaatttaaactttgaaaaatttttagaccggtatatattggccaatggggaacctttttgggattggcgctactataccgcagaaaattattatagaacaagatagtgtgtgatgtataagacagtcattttggctgtctttttctgttattcaattagattactgtggtaaaatttacatagaagtagtctaggaaggagaatgatatgaaggtatttgaggctgattcattactctttgaagcggataaaagaaccaaagagtataaggaactaaggtcgcaaatggtgaagctcaaaaaagcgtttaaggaagtagctaacctagatgacagtgaattttcaggcaagggtgctgacaacattaaagcattttatcatggtcatgtcggcgtaacagaccaatggattgatcttatcgatatgaagattgctttcttaagcagcatgtctgcaacacttgaagatgcgaagatgtctgatgcttacatagaagaatcctttctagaacacgagttggctaacgcttatgcaaaatcaaaatccattatgtctgaacagaaaaaagcaatgaaagacatattaaacaacatcaatgatatccttccccttgaaatattctcaacagaagacttcaaagacaaactttcttctgcagatgacaaacgtgaaaaaacaatcgataagctaaacaagcttgatgaggatttaaaaacagaatacgctgaaacagaaccaaacgaacaatttattcagcaagactttaaaaagctgcaggaatcaacaggcaaaggaaaaaacgctacaccaattcactataacgctaaagcgtacagagaaagtgacatacataagaaaaaaggcgatattgaaaagcattctgaagcttacttaagtgtgaagaaagaagaagcaaaggaacgtgaaatcaaggaattaaagaaaaaacttaatgacggtgtatctgaccctgatgaatatttagagattgctaagaaagtagggtacgagaatctggagccaactcaagtgcagcttgcagtgcaaattgaacaagcgaagcagctagaaggagcaggagaaatcacctgggatatcgtaaaaggtgtaggagttggtttatacgatgtaggaaaagacactgtaaccggcatatgggacttcatcaccgatccaggagaaacactctcagcactgggtaatgcagctatgcatccagtgaaaacatacgatgccatttcagcagcaatagaagagtcatatcaaaaggatatggtgaatggagatgcctattctagatcaagatgggttacctatgctattggttcagtggctgtagctgttgttggtacaaaaggtgcaggagccattaacaaagcagatgcagcgggcaaggtaataaataaagcaagtcaagcaggtaagaaaatcaaggacgttaagattccagatttgctgccttacaaccctaagtataagcttgctctagcagataacgtgccatacaatgtggttgatagccaaaaccttaagaatgaacttttgactaatgcgaagaaaataccggatggaacaagaaaaccgtttactggccaaaagaaaagccctccttggctaaataaagaaaagtatgatgcatatgaaatagaggggaaggtaaaggcgaaggggaaagttaaagatgtaagccgtagagtgtatactatgaaagatattgatattaatcaaaaaacagaattcggtgttacaaatcttcagctaatgaaaaacgggaatgccccttatgcaaaagacggtacacagattaatttacatcacttgattcaagaagaacctggcccaatgcttgaaatcccgaacagcttacatacaaaatatagtgatgtcattcatcagcttaagtctgatggtgaaagttttagaaatgataaggttttaaaagcacaatacgagagctttagaaagagatattggaaatggagagcgaaacaatttgaaaatgagaattgaggtgtttatatgatttattcgaaggttgagaactttattaatgaaaataaacaaaatgctatatttacagaaggtgcaagtcatgaaaacattggtcgcattgaagaaaacctccaatgcgatctccccaacagttataaatggtttttagaaaaatacggtgctggtggtttattcggcgttttggttttaggctacaactttgatcatgcatcagttgtaaatagaactaatgaatataaagaacactatggccttactgatggacttgtggttattgaagatgttgattactttgcttactgtctagatacaaataaaatgaaagacggagaatgccctgtagttgaatgggatagggtaattggttatcaagatactgttgcagacagctttattgaatttttttataataagattcaggaagcgaaagatgactgggatgaggatgaagactgggacgattaagcaaaagtattgctatagcgcaatagaaggcttgagttgcacatcctcaatctaaataaaataagctctcgcaatgagagcttattttattggattaaataattaaagtgacagaagttttctagtcccgttttatatgaaaccttttttattttagcccgtattaaaagtaaattcagagagaaggggagaagcttaattggagttattagatatttggaattggatacaacaaaatggtattcttactgcagtaattacgggtatagttgcattgctattcaatcaaagacaaaaaagtatagaacgattctactctcaatcaggtgaaacattagaaaaaattttagagcctatgtattattccctaaaagaaataaagaatgaagaagatgaaaaccataaaatggtccttatagaaaaatttttcgaagaatatagtgggaaaaaggggaagctatcaaaacttagaaacatcttattgatagatcaaattttgaatacagaagattgtttcagagagtatattttaaacaagaacagcgagaataggaaaaaattattttataaaatgagaatgttagatcaagcagttaataaagaatatagaagtatatttgttactctaaacaagaattataattggtataaagttctttttagaacgaattatattttaagcgctgtttttgtttttgttagatggtttaaagaaactctagctttttttgtcggtgcttcagcatttgcttttataccccttctatatgataaatatttaggcgaacaagttttaggaaattggttagaggtaaataaacttatttttggactttcttgttcagctctttatatcttttggataatacattatttccttttaaaagatacaatgcaaaggaaagatgaaatatctttgtttcaggaatggtttgataaaactaagctagggaaatggactaacaagaatgtctggggaaagattgggaattggaatgttgaaagacgagctagaagagtaagaaatgatgaagatgtataaaggcttgtgcgctattttagatcattataacgttacaagaaacaataaaaaagctttccaagtctcttgaggtttattgtaatgcatttcacggaaaatgtgttataatcagttttacaatacattacagtgcatttctttaatgagaaatgcataaaataaaaaagaccgaggtgctaccaacaccccggctctgtacaaaaagttgcccatcaaagggcttgctcgatgtggttctaggtaggcctatcccttcaggttctgaggctcaagggaggtctattttttctatatacgtcaatagggcgattataaacgacccgattgcaagcattagcattaatgcctggaatgttgacatagcatcacccctttcattaggggatgagcaagactccctcgagtgagcaaaacttactgtacaggaaatatcatactatacataaatgcccttgtcgttaaaaattcacaatatattgacaacgtgaaaggaacttgcaaaatgcaggttcttttttgtattcaattattaaatcatttgaatgattgtcgatatttaatatgtgtaaaaatggaaaaggtgctacaattataaaaagctttgagaggattgtgattatcagtggtaaatgtaaactgaagcgatcttatttatgatccaaaattcttagcattttgcagcttggctacagaaggatacgggggaaataactcagctcccagtagatccattggttttagtgaattctgtgaaacacttgagaaaaatgaagtagttaaacccgagaacaaaaaaagctcacttgacctaaataattctttagattattggaaatcaagatttaatccaggcggtaatctttcggcgttagattctcaggtattagatattatcaaaaaagcttacaacttaggcatggttaacaaagataatatgctgctgcgaaatgaagcaattaatgcttataaaaattcaatttaaatatgaaacagtcctgtaattgggcgctgtgttgtttattgatcatctttttttcagaaacttttaatgccctttcatgttacaattaatagtgaatttcaactggcgataaaggactatattagatggaagagaaatgatttgtcattgctacatactcatttatttagttctttgctccagttttattaattcgtattacacctgaaagtttagaaaggatttgttttttttgggggaaatcaaaaaaaaatttgtgcagtggttagagaaacttctgattagactaaaagaacctaatgttaaggaagaaagcctttttgaagatctttctcctagcaatgatgtcgacactgatggaaaatattctaaagcactaagttgggggttagaaaataaaaaagtgaaaaatatcgccctaactggtccctacgggtctggaaaaagtagcatattaaatacctttcaaaaacaatacagcagggaatatagtttcttaaatatatccttagctacattcaacacagatacggatgatatggagaataagttagagaaaagcatcttgcaacaaatgatataccgggtacacgatagaaccattcccttttctaggtttaaaagaattaagcatataaggactaagagcataattataaatttgattttcttttttgcatttattatagttggcatctacctttttaaacctgatgcacttaaaggaatatatgctgagacgttagtttcaaggagtctcggtactgaagatcagcaacaaatacgactgactatattattagcactgttctttatagtatatcctctactcgcatataaaagaatttatcattttgtccgtgccaacttaaaattgaataaggttacaattgctaatacaacgttagaaaaaaatacaggggaagaaaactcttctatatttgataaatatttagatgaaatattatatttttttgaagcctccaagtataatgttgtaatatttgaggacttagatcgctttaataatataggtatttttgaaagattaagagaattaaatgaacttataaataattcagaacaaatagatagacgtgttgtttttatatatgcgataaaagatgatatttttggagatgcagacactgaaaagttaactagagaccgcacaaaattttttgattttattatcccagtaataccaattattaatgcatctaattcaggagacatacttaaaaagaaaataaaacattcaccatattctgatttgataaacactcatttcttagaggatgtaacaatttacattgatgacatgagagtattaaagaatatttttaatgaatttgttatataccaacaaaaactaagtgcaattgatcttgatcctaacaaaatgttagcaatgataatctacaaaaatatttatcctgtggatttttctaaattacaatataacaaagggttggtatatgaaatctttcaaaaaaaacaacttataattgaggaacaaataaaattaattaatgctaaaatacaacaattagagaggaaattagcgaatatagaagttgagtctttaaaatcaattgctgaattaaattttatatacttgagcgaattagaaatatcaaatttgaattctaattatgatattaatatagatggcgaggtatttagaggcaatacatctaataaagatcggttttttgagaagttaaaaaatgcggatactatctattgttatttaagaaatagaaatggtccagcgacaattaaagaaattgcaactgtttttggtcggaaaccgaactactttgaaagagaagatgccatcaaggctatagagaaaaatgaaatccaaaaattcaagaaagaactattggaattagagagagaaaagcaagaaataagagcgcaatctttacaagtattaattacaaaaatgaattcaaaggatgtattttctgataagctttacgagaaaaaattacttgtttacctgctacgtcatggatatattgatgaaatgtataaccattacatcacttacttctatccagaaagtttaagtctttccgatattaaatttgtatttagtattaaaaaccacgagtcattgccttacagctttgagctggataatatcggtaaaataatgagcaaattagttggtgctgaatttaagcaaatagaggtacttaattttcatctcttaaactatataatggatcattctgaataccgtaattattatgatagcataattgagcgaaacagaataaccgcgatcaacaacctgtttgactgctacaattttaaactcttcgggataacgcttaccgctcatgggcacctctctttaagccatcttaaatgactctgaggtgtctgttaaacccgtggcgattcattttaggcataaaaaaagacctcagttgaggtctatttacatactgttggtgcgaaggccgaactcgaatcggctcttcattaactaactctggcaacgtttccatccaatcggaatccatccaaatagtccccataccactgcatcatctctttcctcccttcaagatactgcgcatggttataggtcccgcgaatcgcgttcttgtccacatgcgcgagctgggtctcaatccaggcagtgttgaatccttcctcatgcaagattgtgctcatggtgtgacgaaaaccatgtccggttgctctcttatcgtaaccaatccttttaataaccatattgatgctggcttcgctcattggtttattaacatcgtttcgacctgcaaagataaactggtaagtaccggtcaattgctttagttgccgaagtgctgctaaggattgagcagaaagggggactatgtggggtcgcctcatcttcattctacttttcggtatttcccagatatggttttcgaagtcgatttcactccattctgccatacgtaattcgacggttcgtaagcccgtaagcatgagtagtcgggtcgccagaagcgttactagactgccggtgtattgtgaaagcttttgtaaaaactcgggtagctcagcagcagtaagaaagggataatgttgtttctcgtacccctgtaaagcactaccaagatcagccgcagggttgtactcggctcggccagtaacaatagcgtaacggaacacttcgctacaacgttggcgcactttactggcaagctccggcgcacctcgcttttccatacgctgcaatacagacagaagctccagtggctttatctcattaaccggctgcgatccaacaaagggaaatacattgtttttgaaggcccggttaacatagtcagcgtagttttttgaccagccagaaacttttgcgttgtaccactcaaccgctatcgcttcaaaagtattcgtaaccgatagtttttgggcaagtagttcggcttttttaacttcaccgggatctttatcatttgccaatgtttttctcgcttcatcgcgcttagtgcgggcttccgcaagtgagatgtcaggataggttccgaacgagagttttttctctttaccggcaaatcgatacttcattcgccagtactttgaaccgttagtattgaccatgagatagagccctccgccatcagcgagtttataggctttatctctgggctttgcagtctcgacctgacgagcattcagtggcatttgggggcctcattttccgttgaacaggataagcccccacttaggcccccaaacgtttattgattcacgtagatatgggtagacttcagttgacgtctcatagcctgagaagaggagttatggctgattataaaaggtttttattgaattcggtagacatcaggagagttatatctggtgtcccctgcaggaatcgaacctgcaactagcccttaggaggggctcgttatatccatttaactaaggggacgaggcggcacgagtatagcgtcatttacactttgcgttaagcgcatcgccgcctgactgctcaaagagtcaccattcaggacgatttttttgtcgatttatcatcattttcccgcgctttaagctccgctttgcgtttgttcgacatgtcgttacggatttgggcatggcttaacagcgcgaagataaacgttccgccgcagatgtttcctgctagtgtcggtaaggcgaacggccagaaaaagtcgctccagtgaagcgtaccgttaaagaccagatacagtatttctacggtaccgaccacaatatgcgtggtgtcagccagcgcaatcagccaggtcatcaatataatcaccacaattttggcgctccctgctgaaggaaacatccagaccatcgtggcgataatccagccagagatgatggcattagagaacatttcgatcggggtgtttttcatcacatccatgccgatttttacaaatgcgtcccgggtgggttcatcaaagatcggcatgtactcaaacgcccaggccgcgatgcccgtgccgatgatattacccagcaggacgacgctccacagacgcatcaataaaccgaaattgccgagggtagggttttgcatcaccggcagaacggcggtcaccgtgttttcggtaaacagctgctggcgggccatgatgacaatcacaaagccgaaggtatagccgagattctcgagtaaaaaaccgcccggcacaccttccagctgaacatgaaatatccctttggcgagcagagaggcgcccattgagagccctgcggcgatagctgaccagaagagggccatggcatcgcgctccatctctttttcaccgtcctggcggatatgctcatggatggccatcgcgcgggaagggaggcgatcttcatcaatttctattttctcgccacgcgctttctcctcgctttcaatttcaagttcctcatcgctctcgccaattttttcttcgcccacgtctttcatatctgctcccggaggttgatctttctgttaagcgtagcggcttttatcgagatgcctgtggggatgctcttaaattggcggcaatgacaacaaaggtgatacatctctttcaaagacattataaaattgccagcgaaacgaattccaaaagccaggctatgctgagatcagagtcacggtgattactgcccgtaattgtgctcatagacatcggtaaacgtgctgttacaatcgcttgcacgtttacagacggagcatcaacggctccgttacggatggcaatcaacgatagccatactgaacagggagatatttatgaaacttcggctgtcggcgcttgcgcttggcgcgacgatgcttgtgggctgcgccagctccggggagcaaacgggacgctccgatcctctcgaaggatttaaccgctccatgtataacttcaactacaacgtgctggacccgtatgtggttcgcccggtggcagtagcatggcgcgattatgttccccagcccgcgcgtaacgggttaagtaattttaccagcaacctcgaagagcctgcggtaatggtgaactacttcctgcagggcgacccgtatcaggggatggtgcactttacccgcttcttcctgaactccattctggggatgggcggctttattgacgtggcaggcatggcgaacccgaaactgcagcgtgagcagccgcaccgtttcggcagcacaatgggacattatggcgtcgggtacggtccgtacatgcaattaccgttctacggtagtttcacccttcgtgatgacggcggcgatatggttgatacgctgtatccggttctgtcgtggctgacctggccgctgtcggtgggtaaatggacggtggaagggattgaaacccgtgcgcaactgctcgactctgatggcttactgcgccagtcttctgacccgtatattatggtgcgagaagcgtacttccagaatcatgactttattgccaacggcggtaagctgaagccggaagagaatccaaacgcgaaggcgatcgagaacgaactaaaagatatcgattcggagtaaataaaaaaggtgagcaatgctcacctttttcaattcctgcgcgattagaacgcgtagttgaagttcataccatacagccaggctttaccttcggaagagaactcatacgggccttctttgaaggaaactttttgaccgtgcatataagagataccggcgtcaattgaggcatccttgttgaaggcataagtagcacctgcgctcagccagaaacggtcctgatccggaatagagatggagcgcttgtcggcaggaaccgggctgtcatcgaaggcaataccggtacggaacgtccagttatcatccatatagtaggttgtccccagcgcgatgcggtaagcgtcgcggaagctttcatctttatagaagagcgtgtcgcctttgctgttggttgctttcagctcctggaactgactccagctggtataggttaggctataatgaattgcccactgcggcgccactttattataacctgacagttcccacatttccggcaggtgcaggctcagagaaccgccagtggtactaccgttggtacccatcggcaggccgaagttgccgaggatctggttataggcagaaggcaggctgctcttataatcgccatcgaaatcgattttaacttcggaacggtaggtaaagccgtaacggttgtttttatcaagttcatacaggataccggcgttccagccaaagccccactcatcgcccttcagataagcgatctgagtgtctgctgggatacccgcaacttgacgcgccagggcaggcggcagtgcacctgagccagcaacgactttgcccaggtcgcccgcgtaacgttcgattttcgctttggcatacacagcatcaaagccaacgccgaagctccagtggctatccagacggtaagcaccgctgaggtttaggttcagggtttccagatcggttttaccgccaaatgcccctgcggcatagttatcaccaaactcggtcgctaaaccgtagttagaggtcacggaggcaccccaaccaaactgttcgttaataggcgccacgaaatgcatgtttggcacccacgccgttggcgcgatgttatctgaattcagactggcaccggtaggtgaacggcccgtaatatcaacgcccggatcaacgaaaatcgcaccggcagagaaggtcggacgatcaaacatcatgatcaatgcggggttacgacttgcgttacccgcatcatccgcaatcgcaccttcccctgaatacgcgcggccaaggccagaggaagaaaattcgtttaactgaaagcccgctgaccatgcggaagtggagacgagtgccactgcgactgccagcgcagtcttgttgaacagggttttctggctcatgaccataacctcattgagttatttttattcaataattgttacataccgtaacaggagcgcgaagtgtagggtctgaggtatgacagacaaatcagaccagtggccagagtataggtccgaccagcctgaatgttgcaagtttgtttattaatattttcaaacatgtttcgtgaaacgagatctggttggcaaaattgtgaccatcgcgactcacccaaaagggtggtttttgttttagatcattttttagtgtgatattggtcacttatccgattttccgccattaacggctggagagagcccgcgccggggcgtaaaatagcagcatcgtgtttatctcgcgcgctgcgcgaatacagaggaaattgagctatgagtaaatgcagtgctgatgaaaccccggtttgctgctgtatggatgttggcaccatcatggacaactccgattgcaccgcgtcttacagccgtgtgttcaccaaccgcgccgaagcggaagagaccctggccgcgctgagcaagcgtgcgcgtgatgttgaatccgatccgtgtgaaatcaagtcgacctttaccgaagtggaaggcggcgtgaagctggacatcgactttgtttttgcctgtgaagctgaaacgctgattttccagctgggtctgcgttaatttctgcggcctgatgccctcaccccgaccctctcccacgggagagggcgcaagcattaaaaacggtaacctacgggttaccgttttgcttttaccttgcgcacccggcaacataccgcacaaatgcccctgccatgcaggggcattttctttttcttctctgtgttttagctcgcactttttcgtttccccgattggctgaatgtaaaaaaatggttaagactattatcaggtcagaccacttagtgtttgcgaatatttttttacaggggagtgttatgagtcaggcattaccgcttattacccgtcagggcgatcgcattgccatagtcagtggattgcgcacgccatttgcgcgtcaggcaacggcgtttcatggcataccggccgtcgacctggggaaaatggtagtgggggagatgctggctcgcagcgaaattccgccggaggtcatcgaacagctggtcttcggccaggtcgtgcagatgcctgaagcccccaacattgcgcgggaaatcgtcctcggtaccgggatgaatgttcataccgacgcctacagcgtcagccgcgcctgcgcaaccagtttccaggccgtggctaacgtcgccgaaagcctgatggcgggcaccattcgcgccgggatagcggggggagcggactcctcttcggtactgccgattggggtcagtaaaaagctggcgcgtatcctggtcgatgccaacaaagcccgcacgacgggtcagaagctcaaactcttctcgcgtttacgtctgcgcgatctgatgcctgttccccctgccgtcgcggaatattccaccggcctgcgcatgggcgacaccgccgagcagatggccaaaacctacggcattacgcgtgaacagcaggatgcgctggcgcatcgttcacatcagcttgcggcaaaagcctggtcggaaggcaagctgaccgatgaggtcatgaccgcctatattcctccctatcgcgaaccgcttgcggaagataacaatattcgtggcacgtcaacgctggcggattacgccaaactgcgcccggcgtttgaccgcaagcacggcaccgtgacggcggcgaacagtacgccgctgacggacggggctgccgccgtgatcctgatgaccgaatcccgtgcaaaagagctgggcattactcccctgggctatttacgcagctacgccttcaccgccattgacgtctggcaggacatgctgttgggtccggcatggtccacgccgctggcgctggatcgcgcggggctgacgctggctgatttaaccctgattgatatgcacgaagcgtttgccgcgcaaaccctggcaaacgtccagctgctggcaagcgagcgtttcgcacgtgatgtgctgggccgcgcgcatgccacgggtgaagtggatcagagtaaattcaacgtgctgggtggctctatcgcctacggtcatccgtttgccgctacaggggcgaggatgatcacgcaaacattacatgaactccgtcgccgtggcggtgggtttggccttgttaccgcctgtgcggcgggcggccttggcgcagcaatggttctggaggctgaataatggatatgccatctgcatttaatctgacggttcgcctcgataacgtggccgttatcactattgatgtgcatgatgaaaagatgaataccctgaaggccgaatttggcgttcaggtgcgcgcgatgctaaagcagatccgcgagaacaaagccattcgcggcctggtgtttatctctgccaaacccgacaactttatcgccggggcggatatcaacatgattgcccgggcgcaaagcgcgctggaagccgaagagctggcgcgtcagggccagcaggtgatgtcggagatcaacagtctcccaatcccggtcatcgcagcgatccacggtgcgtgtctgggcggtgggctggagctggcgctggcctgccacagccgcatctgtactgacgatgcgaaaaccattctgggcctgccggaagtgcagctgggcctgctgccaggttctggcggaacgcagcgtctgccgcggctggtgggcgtcagcacggcgctggagatgatcttaaccggtaaacagctgcgtgcccgtcaggcgctgaaagccggtctggtcgatgacgtcgtgccgcagtccattttgctggaggccgccgttgagcttgcgctgaaagggcgtcaggcaaaacgtcctctgccggttcgcgagcgcgtgctggccggtccgctggggagaacgctcctgttcaatatggtgggcaaaaagaccgaacaaaaaaccaaaggcaattacccggcggcaaagcggatcctcgacgtgatcgaaaccgggctgtcgcagggcagcagcagcggctatgccgcggaggccaaagcctttggtgaactggcgatgacgccgcagtcacaggcattgcgcagcatcttcttcgccagcaatgacgtcaaaaaagatcccggcagcaaggcggagcctgcgcctctgcgtgccattggcgtactgggtggggggctcatgggcggcggtatcgcttttgttaccgccagcaaaggcaaattgccggtacgcatcaaagacattaaccctaagggaatcaaccacgcgctgcagtacagctggcagaaccttgatcaaaaggtcaaacgccgccatatcaaggcaagcgagcgtgataaaaccctggcgacgatctccggtacgacggattacagcggttttgcgcaccgcgatctggtgattgaagccgtgtttgaggatctggcccttaagcagcagatggtggcagacgttgagcagcattgcgccccgcataccatttttgcctccaacacgtcgtcattaccgattggcgatatcgcggcgaaagccgcgcgtccggagcaggtgatcgggctgcacttctttagcccggtagaaaaaatgccgctggtggaagttattccacacgcgaccaccagtccgcaaaccatcgccacggtagtcaaacttgcgaagaagcagggtaaaacgccgatcgtggtcgcagataaagccggcttctacgtcaaccgtattctggcgccctatattaatgaagccatgcggctgctgacggaaggcgagaagatcgagcacgtcgacgaggcgctggtaaagtttggtttccccgttggcccaatccaacttttggatgaggtgggaatagacaccggcactaaaattatacctgtgctggaggcagcttatggcgatcgttttagcccgcctgcaaacattgtttctgcaattttgaaggacgatcgcaaaggcagaaaaaatgaacgcggtttctatctttacggcgcgaaagggcgtaaaagcaagaaacaggtcgacccttcggtttatgggcttatttcgaccaccggtcagggaaaactgtctgccgttcagtgcgctgaacgttgcgtgatgatgatgctcaatgaagcggcgcgctgctttggtgagcaggtgatcaagagcgcacgcgatggcgacatcggcgcggtatttggtattggttttccgccgttccttggcggcccgttccgctacatggatacactcggcgcgggtgaagtggttgccattttgcaacgtctggcctcgcaatatggcccacggtttacaccgtgtgacgaattattgcagatggcggaacggggccagacattttggcctgcacgggaaactgatttcgtaaactgaagtcaaagaagggtaaatcctgaggtgaatgaacctgttctggcgattttgtaaacagagattgactatacttacgccattgaggtaaaaaacagcgtttcattcatcgaatggatcaggcacaatgcccggccatcgggttttctacctcttagcatttatcgcgggtagttaacgccggtgattctggttaacaaaagcggtgcaatatgcaagttttcatcatgcgtcacggcgacgcggcactcgatgccgccagtgactcagtacgtcctttaaccgtctgtggctgcgacgaatcccgtctgatggcaacctggcttaaaggtcaaaaagtggacattgaacgcgttcttgtgagtccgttcctgcgtgcagaacagacgctggatgtggtaggggagtgtatgaacctgccgtccagtgtggatgttctccccgaactgacaccatgcggtgatgtcggccttgtcagcgcttatcttcaggcgctatgcaatgaaggtgtcgcttccgcactggtcatttcccacctgccgctggtcggctatctggtatctgagctgtgcccgggcgaaacgccgcctatgttcaccacttccgcgattgccaacgtcaccctcgacgaaaccggcaaaggggtcttcaactggcaaatgagcccgtgcaacctgaagatggcaaaagcgatctgacgtgacgtgtgacagggcggggtgctatatctttcccgcccttctgtcagggcaactctggcggctgccactcctcaacttcaatcaataccagcaaggcggcatctccgccgtactctttcggtgcctgatgaaacgccattacgtgtgggtgctgagccagccacagcggcgtttgttgcttgaggatatgtttcccgtggccatgcatcacgcaggcgcaaaaaacatgttcgcggcgacaggcggcaatcaacgctcccagctcctgtttcgcctgcatttgcgttaagccgtgcagatccagaaacagctccggcgaataatctccccggcgtaactttttcagttcgaaatggctgacgtcctcgcgcacgtatttcactgcgccctgggtattaagcagcggctgaaactcgtctgaaaagtagtggctgttatcggcctgctcctgcagcagccgtttgaccggaacttcgctgatttttttacgcagcgggcgatggacgatggtgtcctgcgcgattttccgcgtcccggtcattagctggcggaagagcgcctgatcctcctcgctgagcgatgttttctttttcattcgtcattctcatctcgtatttccgatagtgtacccgactaaacgcattttttaacctcaagcggtacgcgtcattgctgatttatcgccgtcttcatggcaaactagccgccgaaaattatgcgagcatgccctggaggaaagagtggataaaatatttgtcgatgaagcagtaaacgagctgcataccatacaggacatgttgcgctggtcggttagccgcttcagcgccgccaatatctggtacggacacggtaccgacaacccgtgggatgaagccgtgcagctggtgctgccgtccctctacctgccgctggatattccggaagacatgcgcaccgcgcgcctgacctctagcgaaaaacaccgcatcgttgagcgcgtaatccgtcgcgtcaacgaacgcatcccggtcgcctacctgaccaacaaagcctggttctgcggccacgagttctatgtcgatgaacgcgtgctggtgccgcgctcgccgattggtgagctgattaacaaccactttgacggcctgatcggccatcagccgcagcacattctggatatgtgtaccgggagcggctgtatcgccattgcctgcgcttacgccttcccggaagcggaagtggacgcggttgatatctctaccgacgcgctggccgtgaccgagcacaatattgaagagcacggcctgatccatcacgttacgccaattcgctccgatctgttccgagatctgccgatgctgcagtacgatctgatcgtcaccaatccgccgtacgtcgatgcggaagacatgtccgatctgccgaacgaataccgccacgagccggagctgggtctggcgtcaggctctgacggcctgaagctgacccgccgcattctggcctgcgcgccggattatctgaccgacgatggcgttctgatttgtgaagtgggcaacagcatggtacatctgatagagcagtacccggatgtgccgttcacctggcttgagttcgacaacggcggtgacggcgtctttatgctgaccaaagcgcagctgctcgacgcgcgcgaacacttcagcatctataaagattaatccagcgggcttcggcccgtttcacaacgctcaaacacaaacaacaacatcggagccgtgatggcaggaaacagtattggacaggtattccgcgtgaccacctttggcgagtcgcacgggctggcgctgggctgtatcgttgatggcgtaccgccaggcatcgaactgaccgaagccgatttgcagcacgacctcgaccgtcgtcgtccgggcacctctcgctacaccacgcagcgtcgcgagccggaccaggtcaaaattctctccggcgtctttgaaggccgtaccaccggcacaagcattggcctgctaattgaaaacaccgatcagcgctcccaggactacggagccatcaaggacgtgttccgtccaggccatgccgactacacctacgaacaaaagtacggcttccgcgactatcgcggcggcggacgttcctccgcgcgtgaaaccgcgatgcgcgtggcggctggcgccattgctaagaaatacctgcagcagaaatttggcatcgtgatccgcggctgtctgacccagatgggcgacattccgctggcgatcaaagactgggatcaggtcgagcaaaacccgttcttctgtgccgatgccgacaagctggatgcgctggacgaactgatgcgcggtctgaaaaaagagggcgactccatcggggcgaaagtcaccgtcgtggccgacggcgtcccgccaggctggggcgagccggtatttgaccgtctcgatgccgacatcgcgcacgcgctgatgagcatcaacgcggtgaagggcgttgaaattggcgacggttttgacgtggtatccctgcgcggcagccagaatcgcgacgaaatcacgaaagcgggcttccagagcaaccacgcgggcggcattctgggcgggatcagcagcgggcagcagattattgccaatatcgcgctgaaaccaacttcaagcattaccgtgccgggccacacgattaaccgcgatggcgaagaagttgagatgatcactaaaggacgtcacgatccgtgcgtggggatccgcgcggtaccgatcgcagaagcgatgctggcgatcgtgctgatggatcacttcctgcgtcagcgcgcgcagaatgcggatgtgacgaccaccattccacgctggtaaacatgaaaaaaaccgcaattgctctgctggcgctgcttgccagtggagccagtctggccgccacgccgtggcaaaaaatcacccatccggtggcggggagcgcgcagtccatcggcgccttttctaacggctgtatcgtgggggctcaggaacttccgctgcaatcggatacctatcaggtgatgcgtaccgaccagcgtcgttacttcggccacccggatctggtgctgttcatccagcggctgggaaaccaggtgcataatctggggctgggcacgatgctgatcggcgatatggggatgcctgcgggcgggcgttttaacggtggacacgccagtcaccagaccggactggatgtcgatatcttcctgcagctgcctaaagcgcgctggagttcagcccagttgctgaaaccgcaggcgctggatctggtgtcgagcgacggtaagcgcgttgtgccctcactctggacgccggatatcttcagcctgattaagctggcggcaaaagataacgacgtcacgcggatcttcgtcaacccggctatcaagcaacagctctgcctcgatgagggaaccgatcgcgactggttgcgcaaagtgcgcccgtggttccagcatcgtgcgcacatgcacgttcgtctgcgctgcccggcgaacagcctggaatgcgaagatcagccgctaccgccgccaggcgatggctgtggtgcggaactgcaaagctggtttgaaccagcaaaacctggaacctctaagcctgagaagaagacaccgcctccgttgccgccttcctgccaggcgctactggatgagcatgtactttaatggataatttcgtcgatctgtttatggtgtcaccgctgctgctggtggtgctgttctttgtggctatgctggccggttttattgatgctcttgcgggcggcggcgggctattaaccgtacccgcgctgctggcggcgggcatgagcccggcgcaggcgcttgccaccaacaagctgcaggcctgcggcggctcgctttcggcgtcgctctattttatccgccgcaaggtggtgagcctggccgaccagaagctcaatatcctgatgacctttatcggttccacgtcgggcgcgctgctggttcagcacgtgcagtcggatattttgcgccagatcctgccggttctggtcatctgcatcgggctttatttcctgctgatgccgaagctcggcgaggaagaccgtcagcgtcgtctgcacggcctgccgtttgcgctgattgccgggggctgcgtcggtttttacgacggtttcttcggcccgggggcaggctcgttttacgcgctggcgttcgtgacgctggccgggtttaacctcgccaaatcgaccgcccatgccaaagtgctcaacgcgacctcgaacgtcggcggcctgctgctgtttatcattggcggcaaggttatctgggcaaccgggtttgtgatgatggcagggcagttcctgggcgcgcgcgcaggctcgcgtctggtattaagcaaagggcaaaagctgatccgtccgatgatcgtaatcgtctcggtcgtgatgagcgccaaacttctttatgacagccatggacaggagatcctcacctggttggggatgcactaatgaacagtacgcataaatatgaacagctgattgagatctttgacggctgttttgctgacgattttaatacccgtctgattaaaggcgacgacgaaccgatctatcttcctgctgatgacgaggttccgtataaccgcatcgtctttgcccacggcttttacgccagcggtttgcacgaaatttcgcactggtgcatcgccggaaaagcgcgtcgcgagctggtggacttcggttattggtactgcccggacgggcgagacgccgcgacgcaggggcagtttgaggatgtggaagtgaagccgcaggcgctggaatggctgttctgcgtggcggcgggtttcccgttcaacgtcagctgcgacaacctcgaaggcgacttcgagccagaccgtattgtcttccagcgccgcgtgcatgcgcaggtgatggaataccttgagaaaggcatcccggcacgtccggcgcgcctgatcgaggccttacagaattattaccacacgccggcgattgcggcggaaagcttcccttggccggaagatctttaacagaggaaagaagatgatcgcagaatttgaatcacgcattctggcgttaattgatgacatggtggaacacgccagcgatgatgagctgttcgccagcggttatctgcgtggtcacctgacgctcgcggtagccgagctggaagcaggtgacgatcactctgccgacgctgttcatgaggaagtgacccgcagtctggagaaagccattcaggcgggggagctctctccgcgcgaccagtcactggtgctgggcatgtgggacaacctgttccagcaggctaaacgctaagtcatcgtttttcgcccggtggcgctgcgcttaccgggcctactaattttccctctccctgtgggagagggttagggtgagggcatcaggccgcaccttacttaaccattttccccttcagcagtttccttacccacaagcgattcggattcagtcccgcaagcgtaaccctgtccagcggaattggctcgtcgctcatttgcgcggctaatacttcagccagcagcggcgcagagcacagcccacgggaacccagcccgcccagcataaacagctccggatacaccggtgcggccaccgccgtttccttgttttcagccagatcttcataggccgcaagcgtcgcgtcatagtccggcacgttgcccgccatcggcagatgatcgcgggtggcgcagcgcacgccgcagcgcgcgtcaccctcgctaacgtcaacctctttcgcccacgccgcatccgggaaacagtcaatcaggcgctggcggttctgcgtctgatccgcttcgctgtagcacatctccgtttcgccacgatgatagctggccccgatgcagtgatggccgttagacggattttgcggtgtcagatagccgtcatagcacagcacctggcgcagtttgccgagttcaggcgcggttgggatgtggctcacttggccgccgaccggataaaccggcagcgtcgctgtctgtataaactggctgatgtgatgcccgttggccagcacagcgctggcatggctcgcctccctgccatccgcaaaacgcagatcccagcgttctgtccgggtgagcgattccaccttgtgggcataccgcaccgtcagcccttgcgactgcgccagggcaatgaccgccgcggtcagttcggccgggcacagccagccgccgagggggtactgaataccgccgcagcccgtctcaacgccagcggtttcggctacctgctgcgcgctcaccgcgcgggcaatctcatccggcaggcccagcgacagcatctgcgcgatcttctgctggctcttctcatcccagccgagctgcgtcacgccacaccagtcgtggtcgaatgccactggcagcgcgtcgtacaggcggcgggcgaaggtaaaggcagcggggaaaaactggaacagggccggatcgtgtgcgcttaaaagcggatagagcgccccctgacggttgccggatgcgccgctggcgggcgcgtcgtcagcgcagtagagcgtgacctgccagccacgctggagaagggcgagcgagagcagggcgctggcgatcccaccgccaacgatcgctacgtcgcgcgatgcgctggcgcggcgcgcaaaccagggcgtctgagcggggatctccagcgtctgctccatcctgccgaccagcatgtcgcgcttgcggccaaagcctttggtcttctgcatggtaaagcccgcctcctgcagcccacggcggacaaagcccgccgaggtgaaggtggcaagggtagccccagggcgcgccagccgcgccatcgcgttaaacagatgctggctccacatgtccgggtttttggcaggggcaaaaccgtccaggaaccacgcgtcgaccttctgattcatcgaatcatcgagcctgtcggtcaggtcgttgatgtcgccgagccataagtccagcgtgacgcgtccgccgtccagaatcagacggtgacagccgccgatgtggggcggccactgcgcctgaagctgctctgcccagggcgcaagctccggccagcgctggtgggcaagccgcagatcgtgcgcggtgagcgggaatttttcgaaactgatgaaatgtaatctttgtagcgtagcctcagggtgagcagcgtggaactgattaaacgcctgccagagggttaaaaaattcagaccggtgccgaatccactttccgcgaccacaaacaggctccgcgggtgcgccgggaagcgggtgctgagctggtttccgtcgaggaaaacatagcgagtttcttcgagtccgttatcattagaaaaatagacgtcatcaaaatctcgggaaacaggtgtaccctcagcgttgaattcgaggttggcgggttgtatagcgttttgtttcacgtaagttactcgtctgacaggcagtggcacgatcttaacgatgtgagtccatcggtgcaaatttccgcagaaaatgtctgatcggacttgttcggcgtacaagtgtacgctattgtgcgactcgaaacttactatagtgcgacttacagaggtattgaatgaaacgtgcagtgattactggcctgggcattgtttccagcatcggtaataaccagcaggaagtcctggcatctctgcgtgaaggacgctccgggatcactttctctgaagagtttaaagattcaggtatgcgtagccacgtatggggtaacgtcaaactggacaccaccggtttgattgaccgcaaagtggttcgtttcatgaacgatgcctctatttatgcttatctctccatgcaggaagcgatcaaagattccggcctgagcgaagaggtttatcagaacaacccgcgcgtgggtctgattgccggctccggtggctcatctaaagcgcaggtattcggtgctgacgcaatgcgtagcccgcgtggtctgaaagcggtaggtccgtacgtggtcacgaaagctatgggttctgcggtttccgcgtgcctggcgaccccgttcaaaattcacggtgtgaactactccatcagctccgcgtgtgcgacttccgcacactgtatcggtaacgctgttgagcagatccagctgggtaaacaggacatcgtatttgctggcggcggcgaagagctgggctgggaaatggcctgtgaattcgacgcgatgggcgcactgtccaccaagtacaatgagactccggacaaagcctcccgtacctacgatgcgcaccgtgacggtttcgttattgcaggcggcggcggtatggttgtggttgaagagctggagcacgctctggcacgtggcgcgcacatctatgctgagatcgtgggctacggtgcaacgtctgacggcgccgacatggttgcgccatccggcgaaggcgcggtgcgctgcatgaagatggcgatgcacggcgttgacaccccaatcgactatctgaactctcacggtacctccacgccggtaggcgacgtgaaggagctgggtgcgatccgtgaagtcttcggcgacaacagcccggcaatctctgcgaccaaagccatgaccggtcactctctgggtgcggctggcgtacaggaagcgatctactctctgctgatgctggaaaacggctttatcgccccaagcatcaacatcgaagagatggacgagcaggccgctggcctgaacatcgtgaccaaaccaacggacgcgacgctgactaccgttatgtccaacagcttcggtttcggcggtaccaacgccacgctggttatgcgtaagctgaaagcataagctttgtgtttgattcagaaggggagccataaggctccctttttttatgcattgacaagcagctgatctcacaggcaaacttcatcactcaacattatcctcacgataatgcgtaagcgtttaacgtcaaccaacgcaccttaatcctgatcatcaggtagagggggcgtggcatttccccgccttactcttcatttcggagtaaagcatgactgcagtaactcaaacagaaacaaccccttcagcgaaggtctcgctgttccgtatcgcctttgcggtattcctgacctatatgaccgttggcctgccgctgccggtgatcccgctgttcgttcatcacgagctgggctatggcaacaccatggtcggcattgccgtgggcattcagtttttagccacggtattaacccgcggatacgccggacgactggcggatcagcacggtgccaaacgctcggcgctgcaggggatgtttgcctgcgggctggcgggcggcgcctggctgctggcggctgttctgccggtcgacgcggcgtataaatttgcgctgctggtgctgggccgtttaatcctgggctttggtgaaagccagctgctgaccggcaccctgacctggggaatggggctggtagggccagcacgttccggcaaggtgatgtcctggaacggcatggccatctacggcgcgctggccgctggcgcaccgcttgggctgctgatcaacagccagttcggttttgcggcgctggctgccaccaccatggtgctgccgctggtggcatgggcctttaacggctcggtgcgtaaggtgcccgcacacaaaggcgagcgtccttccctgtggagcgtggttggccaaatctggcagccgggtctgggtctggcgctgcagggcgtcggttttgcggtgattggtacgttcgtctcgctctattttatgagccgcggctgggcgatggccggttttacgctcaccgcgtttggcggcgcgtttgttctgatgcgcgtgctttttggctggatgccggatcgctttggcggcgtgaaggtggcggtggcgtccctgataattgagaccattggcctgctgctgttgtggaatgcgcccgtggcatccgttgcgctgcttggtgcggcgctgaccggctgcggctgttctctgatcttcccggcgctgggcgttgaagtggtgaagcgcgtggctcctcaggtgcgcgggacggcgctcggcggctatgcggcgtttcaggatatctcatacggcgtcaccgggccgctggccgggctgttagccacctcgtttggctatccgtccgtcttcctggccggtgcggtttccgcggtggtggggatcgtggtaacgctggtggcgtttcgcagaaattaactgttgtcgccgggtggcggctgcgccttacccggcctacggttcaagccgttgtaggcccggtaagcgcagcgccaccgggcaaaatatcaggcaaccagccagaaaatcgccagcgcaatcagtaatgcaataaacatcaatcccggacgcgcagaaagtgttctgaaggtctccacgaccggcgcaaacagcgggctgtagatcggctgaatatttctcacctccggtacgccgccttcgcgctcggcgcggcgaacgaagatctggttgagcagatcctgcacctgcgcggtagtcagtaccgtttgcggcgtggcctgccagttctgctgggcataatcccgaatcacctcgaactcgtgcggctcaagaggctgtttcagcgcggcctgcacagtatgcagggtaggggcgctctgggtgctgagcgtctggcgtgcctggagccaggtcaccagatgggtaaactgtttggccgggatcagctcgcctgccttcacgcccgacagctccagcatggattgccagataagcttcgtcggctcgccggtggccgcggccagctttgtcaccatctgcttgagcgtattgtgctcggcgggcagtagcgggcgctcggtcgccgggcgcacctgcggctgcggaatcgacagctcattgttctgcagcagcgtcagcacggttttgagctggtcgggcgtcagttggcccagcgcggtctgaccatactgctggcgaataaaatcactcaccgcctggcggttatttccctggcccagcagctccgtcagctgagaaacaatctggcgcgtggtgtggttctgctgcgcggttgtaatacgctggttcagattttgctcggcagcggggaaatgacgcgactgcagcggtgcgtcgttcctcacgcctaaatcatgcttcaccccggcccagacttccgcgttttgctgtgaagtcagcgcaatcaggcgcgtgatcagtcgctccagcacggtgcgctgttgcgtggatagcggttgttcaccggcaacgtttggcgtgacggggccttcacccggagggcgtggcggcgtacctgaaatgggctgcatcgtcaaaaatccttaaagtcaaaactcagcgtaaacctggcagacgtatatgcctggcggccagattatggcacacttggcaggttttcttcctctcaaacaggtactcagacgtgaaaatcctcgttgatgaaaatatgccttacgcccgtgagctgtttagccgcctgggtaacgttaaggctgttcctggtcgcccgatcccggtcaacgaactggacgatgccgacgccctgatggtgcgctcggtgaccaaaataaatgaggcgttgctcgccggtaaggcgattaagttcgttgggaccgcaacggcagggaccgatcatgtggatgataaatggctgaagcaggccggaatcggtttctccgccgcgccgggctgtaacgcgattgccgtcgtggaatacgttttctcctcgctgctgatgctggccgagcgcgacgggtttgcgctgaaagaccgcaccgtggggattgtcggcgtgggtaatgtcggcggacgcctgcaaaagcgcctggaagcgttagggatccgcacgttgctgtgcgatccgccgcgcaaagacaacggcgacgacggggatttccgttcgctggacgagctggttgaacagtgcgacgtgctgacgttccacacgccgctgtttaaagaggggccgtataagtctctgcatctggccgatgaggcgttaattcgccgtctgaaggctggcactattctgataaatgcctgccgtggtccggtagtcgataacgccgcgctgctgacgtgtctgaacgaaggacaagacctcagcgtggtgctggacgtctgggagccggagccggatctcaacgttgagctgctgaacaaggttgacgttgccaccgcgcatattgcgggctataccctcgaagggaaagcccgcggtacgacgcaggtcttcgaagcctacagcgcctttatcggccatccgcagcaggtggcgctggataccttactccccgcgcctgaatttggtcgcattacccttcacggcccgctcgatcaggcaacgctgaaaaggctggtgcatttggtgtatgatgtgcgccgcgatgatgcgctgctgcgtaaagtggcggggatcccgggtgagtttgataagctgcgcaagaactacgttgagcgccgcgagtggtcttccctctatgtgatgtgcgacgacgcgtcggcggcgacgctgctgcacaagctggggtttaacgccgttcatcacccggcgcattaatgtcttcttaatgctccctgtcggatactccgacagggacgcttttttatttctggagtaaaccaccatgtctgaaggctggaacattgccattttaggtgccacgggtgccgtgggcgaagccctgctcgaaacgcttgctgagcgtcagttcccggtgggcgatatctatgcgctggcgcgaacggatagcgcgggtgagcatctgcgttttaacaataaatccgtcatggttcaggatgcggcggcgttcgactggacgcaggcgcagctggcgtttttcgccgcgggcgctgaagccactgcggcgtacgttgaagaggcgaccaacgcaggctgcctggtcatcgatctgagcggtctgttctccatggagccggatgtgccgctggtggtgccggacgtgaacccgtttgtactggctgactaccgcaaccgtaacgtcattgcggtaccgaacagcctgaccagccagctgctgactgcactgaaaccgctgatcgacgacggcggcctgtcgcgcattaccgtcaccagcctgctgtcggcgtccgcaaacggcaaaaaggccgttgacgcgctggccgggcagagcgcgaagctgctgaacggcattccgattgatgaagatgatttctttggccgccagctggcgttcaacatgctgccgctattgccggaccgcgagggctccgtgcgcgaagagcgtcgtatcgtcgatgaggtgcgtaaaattctgcaggacgatggcctgatgatctccgcaagcgtcgtgcagtccccggtcttctacggtcacgcgcagatggtcggctttgaagcgctgcgtcccctggcggcagaagaggcgcgcgatgcgtttggccgcggggaagacatcgtcctctctgaagagagcgagttcccgacgcaggtaggcgacgccaccggtagcgcgcatctttccgttggctgcgtgcgtaacgactacggtatgccggagcaggttcagttctggtccgttgccgacaacgttcgtttcggcggcgcgctgatggcggtcaagatcgccgagaaactggtgcaggagtacctgtactgatgtcagacgtggaacaaaagccggttcataaaattgccctcggtattgagtacgatggcagtaaatattatggctggcagcgtcagaatgaggtgcgcagcgtccaggagaaactggagaaagcgctctctcaggtggcaaacgagccgattaacgtcctgtgcgcaggccgtacggatgcaggcgttcacggcacggggcaggtggtgcactttgagaccaccgccgtgcgtaaggatgccgcctggacgctgggtgtaaatgcgaatttgcctggtgacattgcggtgcgctgggtgaaagctgtgccggatgattttcatgcgcgtttcagcgccaccgcgcgtcgttaccgttatgtcatctacaaccagcgtctgcgtccggcggtgttaagccagggcgtgacgcatttttatgaaccgctcgatgcggaacgcatgcatcgcgcggcgcagtgtctgattggtgaaaatgactttacctcgtttcgtgcggtgcagtgtcagtctcgcacgccgtggcgtaatgtcatgcacattaacgtcagccgttttggcgcgtatgtggtggtggatatcaaagccaatgcctttgtacatcatatggtgcggaatattgtgggcagcctgatggaagtgggtgccggacaccagccggagagctggattgcagacctgctggcagcgaaggacagaacgcttgcggcagccacggcgaaagcggaagggctgtatctggtctcggtagactatccggatcggtttgacctgccgaaaccgccaatggggccgctgtttttagcggactaaacaaggtgcaattaaggcttagacaatatggacgtaattcgttttttgattgatttcatcctgcatattgatgttcacctggcagagctggtcgcgcagtatggcgtctgggtttatgccattctgttcctcattctgttctgtgaaaccgggctggttgtcacgccgttcctgccgggcgattcactgctgtttgtcgccggggcgttatcggcgctgcccaccaacgatttgaatgtgcatcttatggtggtgctgatggtgattgccgccatcgtcggtgatgcggtcaactacacgattggacgcgtattcggtgagcggctgttcagcaatccggattcaaaaattttccgccgcagctatttagataaaactcatgcgttttatgaacgccatggcggaaaaaccattatccttgcgcgctttgtgcctattgtgcgcacatttgcaccgtttgtggcgggaatgggacatatgtcctatcgtcattttgccatgtataacgtcgtgggggcgctgctttgggtactgctatttacctatgcgggttacctgtttggcgatctcccggtggttcaggaaaatcttaagttactgattgtagcgattattgtgctttccgtactgccgggcgttatcgaaatcattcgtcataaacgtgcggcggcaaagcaagcgaagtaaatgcacactggcggttcgaccacttttttatccaaagtttcgggctgttatgttttaatgtgcaacattcatggtctgttggaggcaaaaatggcattattcgcctcttatagcaaaactggcatacgaccaggttcaggcagaaaggttatcaatgagctggattgaacgaattaaaagcaacattaccccaacgcgtaaagcgagcattcctgaaggggtatggacgaagtgtgatagctgcggccaggttctgtatcgcgcagagctggagcgcaaccttgaggtgtgtccgaagtgtgaccaccatatgcgtatgtcggcgcgcaaccgcctgcatagcctgctggacgaaggttctctggtagaactgggcagcgagcttgagccaaaagacgtgctgaagttccgcgactccaaaaaatataaagatcgtctggcctccgcacagaaagagaccggcgagaaagacgcgctggtcgtcatgaaaggtaccctgcatgggatgccggttgttgccgctgcgtttgagttctcctttatgggcggctcaatgggctccgtggtcggtgcgcgcttcgtgcgtgccgttgagcaggcgctggaagacaactgtccgctgatctgcttctctgcctccggcggagcacgtatgcaggaagcgctgatgtccctgatgcagatggctaaaacctctgcagcgctggcgaagatgcaggagcgcggtctgccgtacatctccgtgctgaccgacccaaccatgggcggcgtctccgcgagcttcgcgatgctgggcgacctgaacgtcgctgagccaaaagcgctgatcggctttgcgggtcctcgcgttatcgagcagaccgttcgtgaaaaactgccgccgggattccagcgcagtgagttcctcattgagaaaggcgccatcgacatgatcgtccgccgtccggaaatgcgcctgaaactggcgcgcatcctggcgaagctgatgaatctgccagcgccgaacccggatgagccgcgtgaaggcgtggtggtaccggatcaggaacccgaggcctgataactgaaaagggcagggccggttggcgctgcccttttgctttctaatctgttaatgacaaccgggcattatggaaaataaaagcattccccaagccacgtcgcccctagccgcgtggctttcttatctggaaaacctgcacagtaaaaccatcgatatggggcttgagcgcgtaagccaggttgccgcgcgtcttgatgtgctgaaaccggcgcctttcgtgttcaccgtcgcaggcaccaacggcaaaggtaccacctgccgcacgctggaatccgtcctgatggcggcgggctacagggtcggcgtgtacagctcgccacatctggtacgctacaccgagcgggttcgtgtgcagaaccgcgagctgccggagtcggcgcatacggcatcgttcgcggaaattgaagccgcgcgcggagagacctcattaacctattttgaatacggcactctgtcggccctgtggctgttcaaacaggcccagctggacgtggtgatccttgaggttggtcttggcggacgtcttgatgcgaccaatatcgtcgatgcagacgtggcggtagtgaccagcatcgcgctggatcatatcgactggctggggcccgatcgtgaaagcattggccgcgagaaggccggtattttccgggcaaataaacctgccgtggtgggcgagccggacatgccgcacaccattgctgacgtggcgaacgaaaagggcgcacagctgctgcgccgcggcgttgactggcagtatgaggttcaggacaacggctggcgctttagcgacgcgcagggggcgctggacaacctgccgctgccgcaggtcccgcagccaaatgcggcaaccgcgctggcggcactgcgcgccagcggcctcgtggtcagcgaacaggcgatccgcgagggtatacaaaacgcgattctgccaggacgtttccagattgtgagcgagtcaccgcgcctgattctggatgtggcgcacaacccccacgcggcggcgtatctcgcgggacgtctcaaatcgttaccaaaaaccgggcgcgtgctggcggttatcggtatgcttcatgataaagatatcggcgggacgctggcctgcatggagagtgtggtcgatagctggtattgtgctcctctggaggggccgcgcggcgcgacggctgagcagctgatggaacatctcggcaaaggcgcaatctacagtagcgtggcgcaggcctggcatgccgcgatggcggaggctaaaccagaagataccgtgctggtgtgtggttcattccacacggtggcacatgtcatggaagtgatggacgcggggagaaccggtggcgagtaagtttcagaaccgtttaacaggaaccattgtgctggtcgcgctcggggtgattattcttcccgggctgctcgacgggcagaaaaagcattatcaggatgagtttgccgcgattccgctagtgccgaaaccgggcgaccgcgatgagccggatatgctgcccgcggcgacgcaggcgctgcctgctcagcctccggaaggggcggcggaagaggtgcgcgcgggcgatgccgccgcaccgtcgctcgatccgtctcgcctggcggccacgagcaacagcgatatcgatcctgtgccggtcgagcagcctaaaccggttgaaaaaccgaagctggttgagaagccgcagccgaaaccgcagcgtgataaagcggcagaacagctcgccgcagcgtcagagacgcctccgccagcaaaaccgacgcagcaggacgctgctgccccaacgggcaaagcctacgtggtgcagctcggtgcgctgaaaaatgcggacaaggtgaatgaggtggtgggtaaactgcgcagtgcgggatatcgtgtttacacttcaccttccacgccggtgcagggtaaaattacccgtatcctcgtggggccagaagcgtctaaagacaaactgaaagggtcgctgggtgagctgaagcagatctccggcctgagcggtgtggtgatgggctacagcgcgaactaagtacgacctgctcctgtaagagagaggcgataagccacggcgttgaacattttttcagcgccttttttatttacgcgcgggaaggaaatccctacgcaaacgttttctttttctgttagaattcgccccgaactggatgacagggcgtttaatcgtgggacacatatggtctggattgattacgccatcattgcggtgattggtttttcctgtctggttagcctgatccgtggctttgttcgtgaagcgttatcgctggtgacctggggttgtgctttctttgtcgccagtcattactacacttacctgtctgtctggttcacgggctttgaagatgaactggtccgaaatggaatcgccatcgcggtgctgtttatcgcgacgctgattgttggcgctatcgtcaattacgtgataggtcagctggtcgagaaaaccggtctgtcaggaacggacagggtactcgggatctgtttcggggcgttgcgaggcgtgctgattgtggccgcgatcctgttcttcctggatacctttaccgggttctccaaaagtgaagactggcagaaatcgcagctcattccagagttcagcttcatcatcagatggttctttgactatctgcaaagctcgtcgagttttttgcccagggcataaaccctgagatgtggcttaacgaggaaaagacgaatgtgcggtattgtcggtatcgccggtttcatgccggtaaaccagtcgatttatgacgcgttaacggtgcttcagcaccgtgggcaggatgctgcgggtatcatcaccattgatgcaaacaactgcttccgtttacgcaaggcgaatggcctggtaaacgatgtgtttgaagcccgccatatgcagcgtctgcaaggtaatatggggatcggtcacgttcgttatcctaccgctggcagttccagcgcctctgaggcacagcctttctacgtcaactcaccgtatggcatcacccttgcccataacggcaacctgaccaacgcgcatgagctgcgtaaaaagctgttcgaagagaaacgtcgccacattaacaccacctctgattctgaaatcctgctcaacgtgttcgccagcgagctggataacttccgtcactatccgctggaagcggacaacatttttgccgcgattgccgcgaccaaccgtcagatccgcggtgcgtacgcctgcgtggcgatgatcatcggtcacggtatggtcgccttccgcgatccaaacggcattcgtccgctggtgctcggcaagcgcgacctcggcgatggccgtaccgaatatatggttgcctctgaaagcgtggcgctggataccctgggcttcgaattcctgcgcgacgttgcgccgggcgaagcggtgtatatcaccgagaagggccagctgtttacccgccagtgtgccgacaacccggtcagcaacccgtgcctgtttgaatacgtctattttgcccgcccggattcgttcatcgacaagatttccgtttacagcgcgcgcgtcaatatgggcacgaagctcggcgagaagattgcccgcgagtgggacgatctcgacatcgacgtggtgattcctatcccggaaacctcctgcgatatcgcgctggagatcgcccgcattctggataagccataccgtcagggcttcgtgaagaaccgctacgttggccgcacctttatcatgccggggcaacatctgcgccgcaagtccgtgcgccgcaagctgaacgctaaccgcgcggaattccgcgacaagaatgttctgctggtggatgactccatcgttcgcggtaccacctctgagcagattatcgagatggcacgcgaagcgggtgcgaagaaagtctatctggcctctgctgcgccggagattcgcttcccgaacgtgtacggtattgatatgccaaccgccaacgagctgatcgctcatggtcgtgaagtggatgaaattcgccagatcatcggcgctgacggcctgattttccaggatctgaacgacctcatcgacgcggtgcgtgccgagaatccggaaattcagcagtttgaatgctccgtgttcaacggcatttacgtgaccaaagacgttgaccagcagtacctcgactatcttgattcgctgcgcaacgacgacgccaaagccgttcagctgcaaaacgatctcgaaagcctagagatgcacaacgaaggttgatgttccggcaggtgagggcgtatgccctcacttgcaactccccgcaaaatcctgcacagtctgccctgaaatcagtaagggcgaaaatcatgaaacgactcatagttgggctcagcggtgccagcggcgcgatttacggcgtacgtttgctacaggttctgcgtaacgtggcggacgtcgaaacccatctggtgatgagccaggcggcgcggcagaccctctctctggaaaccgatctcaccctgcgcgatgttcaggcgcttgcggatgtcgttcacgatgcccgtgatatcgccgccagcatctcctcaggctcgtttaaaaccgccggcatggtgatcctgccctgttcaattaaaacgctctccggcattgtgaacagctataccgacaccctggtgacgcgtgcggcggatgtggtgctgaaggagcggcgtcctctggtgctttgcgtgcgggaaacgccgctgcacctgggccatctgcgcttaatgacgcaggctgctgagctgggggctgtcatcatgccgccggtgcccgcgttctaccatcgtccgcaaacgctggacgacgttatcaaccagaccgttaaccgcgtactcgatcagttcgacatcgacctgcccgaggatctcttcacccgctggcagggtgcctgaatctgtgcacatagccggtgcatgaaaagacacgttgccctgtttcagggcaattatgcaacggcgatcatatcctcgacatttaattcgttttttccctttttctctctccggttcgttcggcagacctgctatctttcaccattaaggcagtatcgcaacgttttattaacatatttaacgtcgaagttttaaccagacggcaatgtggcataagacctgcaagatgaagcctgcaacacaacacacaacacaatacataataaaatcacggtacttgagggtaaatgtatgaagaagacggttctggctctgtctttgctggtggggttaagtgcggctgcaggtagctacgcagcgcttccacagacggttcgtatcggtacagacgcaacctacgcgccattctcttccaaggatgcgaaaggcgatttcgtggggtttgatatcgatctgggtaatgaaatgtgcaaacgcattgcggtgaaatgcacatgggtgggcagcgactttgacgcgttaatcccgtcgctgaaagccaagaaaatcgacgccattatctcttctctttccatcactgaaaaacgccagcaggagattgccttctctgacaagctctacgccgcggattctcgcctgattgcgcctaaaggctccccgattaagcccaccatcgactcgctgaaaggcaagcatgtcggcgtgcttcagggttcgactcaggaaggctatgccaatgctaactggcgtgagaagggcgtagacgtggtggcttaccagaaccaggatctgatttactctgacctggcggcaggccgtctggatgcggcattccaggatgaagtcgccgcgagcgaaggcttcctgaagcagcctgcgggtaaagactacgcgtttgcaggcccgtcggtgaaagacaaaaagtactttggcgacggcaccgggattggcctgcgtaaggatgataccgagctgaaagccgccttcgacaaagcctttgcagagctgcgtaaagacggtacgtacgacaaactggcgaagaaatacttcgacttcaacgtatacggtgaataacacctggcggtgacgcaccggaaaggtgcgttacgggagcggttgacccaatacggtgcatttgatgcactgtattggatcgctgtgtgcatacttacgcattaatgatgcaaaaattcccgctggaaaggcattaatctttgcctgactgaggggattaatggcacattagcaccaccccgtcgtcgtaaaaatcccgtatgaagacagtttgttgaggacaaatatgaaaaaactcgtgttgtcattatcactgatactggccttttccagcgccaccgcggcattcgcagctattccgcagaaaattcgaattggtaccgaccctacctatgcgccgttcgaatcgaagaattcaaagggtgaactggtcggttttgacatcgatctggccaatgagctgtgcaaacgcatcaaagcacagtgtacctacgttgagaacccgctggatgcgctgatcccatccctgaaagcgaaaaaaatcgacgtaatcatgtcctccctctccatcactgaaaaacgccagcaggagattgccttcaccgacaaactctacgcggccgattcacgtctggtagtggcgaaatcgtctgatattcagccaacgctggaatcgctgaagggcaaacgcgtgggcgtgctgcagggtaccactcaggaaacctacggcaacgagcactgggcaccgaaggggattgaaattgtctcctatcagggccaggaaaatatctacgctgacctgacggcaggccgtattgatgccgcattccaggatgaagtcgcggctagcgaaggcttcctgaaaacgccggtaggtaaagattacaagtttggcggcccgtctattaaggacgtgaagttgtttggtgtgggcaccggtatgggcctgcgcaaagaagacaacgagctgcgtgaggcgctgaacaaggcgttcgctgaaatgcgcgcagacggcacatacgacaagctggcgaaaaagtactttgattttaatgtttacggcggctaattgccccgtcatataacgtgcggcccctcccacggcgggaggggaaaagacacggttccaccactcacgatacgacagggctcgcggtatgctgtacggattttctggcgttattttacagggcgcgcttgtcacccttgagctggctatcagctccgtggtgctggcggtgctgataggtctggcaggcgcaggggcgaagctttcagctaacaaaccgctggcgctaatctttgaaggctacaccacgctcattcgcggcgttcccgatctggtgctgatgctgctgatcttttacggtctgcagattgcgcttaacggcataacagacgcgatgggcatgggacaaattgatatcgacccgatggtggccggtattattaccctcggttttatctacggcgcctacttcactgaaaccttccgcggtgcttacatggccgtgccgaaaggtcacattgaggcggcaaccgcatttggttttacctcatcacaaacgtttcgtcggattatgttcccggccatgatgcgctacgcgctgccgggcatcggtaacaactggcaggttatcctcaaagcgacagcgctggtctcgctgctcggtctggaagacgtcgtgaaagcgactcagctggcgggtaagagcacctgggagccgttctattttgcggtggtctgtggcgtgatttatctggtctttacgaccgtctccaatggtgtgctgcttctgctggagcgtcgctactccgtgggtgtgaagagggctgacctgtgattgagattattcaggaatactggaaatcgctgctgtggacagatggctaccgctttaccggcgtggcgattacgctctggctgctgctctcctccgtggtaatgggcggtattctggcggtgtttctcgccattggccgcgtctcgaacaataaatttatccagttcccgatctggctgttcacctacgtctttcgcggtacgccgctgtacgtgcagctgctggtgttctactcgggaatgtatacgcttgagatcgtaaaagatactgagatgctgaatgcgttcttccgcagcggtctgaactgtacggtgctggcgttgacgcttaacacctgcgcctacaccacggagattttcgcgggggcgattcgttctgttccttacggtgaaattgaagcagcccgggcctacggcttctcgtcggtgaaactctaccgctgcatcattctgccatcggccctgcgtatcgcgttaccggcctacagtaacgaagtgattttgatgctgcactcgactgcgctcgcctttaccgcgacggtgccggacctgctcaaaatagcgcgcgatattaactccgcaacctatcagccgtttaccgcgtttggcattgcggcggtgctctatttaattatctcttatgttctgattagcctgttccgtaaggctgaaaaacgctggttgcagcatataaaaccttcttcgacgcactgagaaagatgatggctgagaacaaattaaacgtaattgatttgcacaaacgctacggcgaacatgaagtgctgaaaggggtgtcgctgcaggcgaatgcgggcgacgtgatcagtatcatcggctcatccggctcgggaaaaagtaccttcctgcgctgcatcaacttcctcgaaaagccgagtgaaggctcaattgtggtgagcgggcagaatatcaacctggtgcgtgacaaagacggtcagctgaaggtggcagacaagaaccagctgcgcctgctgcgtacgcgcctgacgatggtattccagcactttaacctctggagccacatgacggtgctggagaacgtgatggaagcaccggttcaggtgctgggcctgagcaagcatgaagcccgcgagcgcgcggtgaaatacctggcgaaagtgggtatcgacgaacgccagcagatgaaatacccggtgcatctctccggcggtcagcagcagcgtgtctctatcgcccgcgcgctggcgatggagcccgaggtgctgctgttcgacgaaccgacctccgcgctggaccctgaactcgttggcgaagtgctgcgcatcatgcagaagctggccgaagagggcaaaacgatggtggtggtgacgcacgagatgggcttcgcccgtaacgtctcgaaccacgtgattttcctgcatcaggggaaaattgaagagcagggccacccggacgaggtgctggcaaacccgcaaagcccgcgtttgcagcagttcctgaaaggctctctgaagtaagagggcatcagaccgcagtgcagcccaatcgcccggtggcgcttcgcttaccgggcctacaaaaccgtaggccgggcaaacgcggtgccgcccggcattcaggccgcgccacactccagccgatacacccagtcgtcatagcgcacgccatcaatctcatacgctttttccagtacctgagtgcgcacaaatcctgctttctccagcacccgcactgacccgccgttgtccgccagtacgtacgcattaatcgccttcacgccggtctggttaaaggcgtaatcacacaccgcgcgcagcgcttcgctggcgatacctttcccctgcgcggcaggcacaaccgtatagccgatgtcggcctcttcacgattctcagcgctgatttgcaggccgatatcgcccagcggcgtatcatcatcccgggcgcgaatgacaaacacatgagcagcagcgagtcgcgcggcaaacacgcgtcgggtctctttttccggggcgatggcggccatatagcgcatgatgcggcgatcttcacgcagcgagcggaagaaggcccagtcagtgggttcaaaaggggtgaggtaaagtcggggagtggtgatggttgccattgttacgccatttcttcggaacatggcctgtcactgtaccatattcaccgcaccacatcccccagcgcctcttctaattcataccagcggaacgcaaacccggccgcttccagccgttttggcagcgctctctgtccgcccagtaccagaacagacgcttcacccatcagcagccgaatcgccgtcgcaggcacgcgcaatatcgccgggcggtgcagggcatgtcccagcgcgtgggcaaactgttcatttcgcaccggatacggcgcaaccatgttaaacggcccgcgcagatcgttattcagcagccagagaatcccgttgaccatatcgtcgatatggatccacgccatatactgacggccattaccgatcgggccgccaaggccgagtcggaatggcgggagcatcttcgccagaatgccgcctttcggcgcgaggacgacaccggtccgcagcaggcagacgcgggtccgatcgctctgcgccgcgcaggcaatacgctcccactgggcgcagagcttatgggtaaactcgttatggggaggctcttcctcggtcaccaccacctcgccaagatcgccgtaatagcctactgcggaacccgaaatcagcacggcaggcggcgtatggctgttgcggatcagctcgaccagcttttcggtaatgttccaccggctgctgcataacagctgtttttgctcttccgtccagcgcttatcggcgatgggttctcccgcgaggttaataacggcgtcgaaaccgtccagattttgctgctcggccagatttttccagatatcaacacctgcccccagcacctgacgcgctttttccgggctgcgcgagaccacggtgatgtcgtggtgcaaggcctgcagacgcgcaatgaggtgacgaccaatcaggccagtaccgccggtcagcaaaatcttcatacaacctccagatttacgcctggcgtttccagcttaacgtcatagagacggagtcggcgtaacgcagggcgtgaagtttatcgatctcaacttcagcataagtgacccagtgatgttcgcgtgcgatatcgagcacatcctgagttaatttttccagcagagagaaacggttattctccacaaactggataatgttcttggtgattgtgcggtagttcagcgcgtcattgatgtcttcgctggcgcgcgctttgtctgcggggtagtgaatcaccacattaataacaatatcctgacggttggcgatctcttcctctttgataccgatgaaggtacgcaggcgtaaattttttatacgaataatggcgtctggctgtgacattgcaggtcttctccgtgtcagtatttcctgcccataatacatgagagcctcacaggcacccagcctcataccgggttaaatttgctggattttttgcatcgctcgctcggtcgccgggcgggtccggatgcgctcaaaccagttgttcaccgccgggtaagcggccaggtcaattcggtgtttttcatgcgtattcacccacggccagcaggcgatgtcggcaatactgtaatgatcgcccccgagccacggcgttttctccagccgacggttcagaacgtcatagagccgctgcgtctcaacctgatagcgttctatcgcgtaaggaatgggttgcggggcgtaagcggtaaaatgatgattttgtcccagcatggggcccagcccgcttgcctgccagaaaagccattgcagcgtatggtggcgctcgcgcagttcgccgctcagcagcttgccggttttctccgccaggtagagcaaaatttcaccggattcaaacaggctcaacggtctgcccccgtccgccggctggttatcaatgatggccgggattttattattcggcgagatagccagaaagagagggctgaactgctcgcctttgctgatatccacgcgaatgatcctgtaatccagctcggcttcttcaagaaagagggtgatcttatggccgttgggggtaggggcataataaaggtcgatcattctcaactcctgtccatgcgaatagtggtgccatgacaaatgagtataggtggttgttgtaaatcgtgagttttcatcaagtgacagcgaggcaaagagattatatgttgagtaaaaaccgatcagcctatgaggatgttatgaaccagcccgtcatcacgttgtggtccgatgcgaacttcttttctccctatgtcatgagcgtttacgttgcgctggccgaaaaaggactcgcttttaccctgaagaccgttgatctcgacggcggtgaacatctcaagccgcagtggcagggttacgacctgacccgtcgcgtgccggtgctggagattgacggatttgccctgagcgaatcgtcagcgatcgatgagtatctggaagatcggttcgcccccccggagtgggagcgtatctatcctcacgatctgcaaaagcgcgcccgggcgcggcagatccaggcgtggctgcgcagcgatctggtgccgattcgcgtcgaacgctccacggacgtcgtgtttgccggggtgaaaaagcccgccctcagtgcagaaggccaggaaagcgcgcagaagctgattgaaaccgcctccttactgctcgcccatggcaacccaaacctgttcggcgagtggtgcattgcggatgccgatctggcgctgatgctaaaccgcctgatcctcaacggtgatgaggtgccgcagctgctggtggattatgccgcgttccagtggcagcgtgcctccgtgcagcgctatgtggcactctcggctaagcgcgcgggctgataagccctgacgcttcaggtatgatgggggcagtttgttttcccgaggagtgactgatgaaactgatgtttgcgtcggatatccatggatcgctgcccgcgaccgagcgtgtcctttctctgtttgagaaaagcggtgcgaagtggctgattattctgggtgacgtgttgaatcacggcccacgcaacgcgctgccggaaggctatgaccctgcgcaggtcgcggaaaaactcaacccgtatgcctcgcgcatcatcgccgttcgcggcaactgtgacagcgaagtggaccagatgctgctgcattttcccattaccgcgccgtggcagcaggtgctgctcgaacaacaccgtctgttcctgacccacgggcatcttttcagcccggataatctcccggccctcgcggctggcgatgtcctggtttacggtcatactcatattccggttgcggaaaaacgcggtgagatttatcactttaatccgggctcggtcagcatcccaaaaggcgggtatcctgcgagctacggcatgctggaaggaaataccctgagcgttatcgcacttaatgatcagcaagttattgcgcaggtagcgattaatccgtaagttacacctcaactgcaaacgcgccgaaagagcgcttagaaaagaaggtttcccgatggtggagcagagtcatttggcaagtacagagtgggttgacattgtcaacgaagagaatgaagtgatcgcgcaggccagccgcgagcaaatgcgtgcggagcgcctgcgtcaccgtgcgacatatatcgttgtgcatgacggtatgggtaaaattctggttcagcgccgcacggacaccaaagattttctcccgggtatgctggatgccactgcaggcggcgtcgtccaggcggatgaagtgctgctggattctgcgcgtcgtgaagcggaagaggagttaggcatcgccggcgtgccgtttgccgagcacggtcagttctatttcgaagacgagaactgccgcgtctggggcgggctgtttagctgcgtctcccacggcccgttcgccctgcaggaagaagaagtgagtgaagtcagctggatgacgccggaagagatcaccgcgcgctgcgacgagttcacgccggattcgttaaaagcgctggcgctgtggatgacccgcaacgccaaaaacgaatcgaccaaatcagaaaaagaggaagaggctgagtaagcgtcagcagctctctctcagacacaggctggacgcgatgggcttttgatcgcgccagtctccgccattcaggcgctccagtagcgctttcccggcttcgatgccaatcttacgatgcggcaccgccatggtcgtcagcggcggctgacagacgcggctcacgtcgctatcgccaaaccctaccactgccagatcgtccggcactttgattcgcctgcgctggcactcgtacagcgcgccgcaggccagctcgtcagagacgcacaccagcgcatccagctcaggccatgccagcaggaattcgggcagctgcgccgcgccggtcgagaagctcggcggcatcgccgcgttaatgacccggttaggcgacatatggtggcgaagcatggctttataccagccctgcagatgctgctggaaaatccactgctcctggttggcgcacagcaggccaatgttttgatagccgcgcttaatgaccatctccgtgagctcaaacatggccgccacgttatcaatcccgatgttcatatcaatcggatcggcgcgcatggcgcccatctccatcaccggaatcgaggcgtttttcagccagtggcgaacggtgtcggtatgttcaacgctgagcaaaattgcggcggcgatatttgacgccagcagcgtctccagcaacttctcctcctgctcaagacgatgctgggattctgccagcatgatctgatatccggcaggctgcagcacctgctgtagcccggcgaacatctccgagcagccggcttcggagaggttgggcaccaccatggctatcgtccatgacgacgccgaggcaagggcactggcggcaagattaggcatataacccagctcctgcacggcagcttcaattttttctcgtagtttatcggaaacctgttcgggcgtgcgaagcgcacgggacacggtcatcgtgcccacaccggcaagctgtgcgacatcggcgagtgtcactttaccagtactgcgccgttttcgggttagagacatacaccttcctgctgaccagacgcgttctttttttccttcgtttcacgtgacaggcagtatacgccttaaatccctttttttgctgtgatttagcaacgtgattgcaatttgatagcgctatcaaatttctgcatgttaacgattggtagcgctatctttgtgatcgcgatcgcagtcaatccgcgatgcgttgaataaagtttgctcatcttaaacgtgtggcgggagtgaaaagtgctcaaaaaatggatatatgatacaaccatcacgctgcaggagagcgtggaagactggccgcaggcgctgaagctgtgcgcgaagccgctgctggatttgcaggtgattgagcctgaatacgtcacggccatcatcaagcagcaccacacgttaggaccttattatgtgctggcaccagggctggcgatgccgcatgcgcggccggaggaaggcgccaaaggactggggttgtcgttattaaaactaaaacagggcgtctcgtttggtgccggtgagtttgaccctgtcgatgtgattatcatgctcgcggcacctgacaaacatagccatatcgaaatgatatccgcactcgcagaattattttccagcgacgaggagatggagaaactgcatcaggcgaataccctggaggaaattaaaaaaattattaaccgcttctgatttaattctgtaatccggtttttcactacattacgcgtcagcgtgatggggcgtactctactcaaaataaggggacaacaatgaaaatcatggctatttgcggttctggcctgggcagcagttttatggtcgaaatgaatattaaaaaggtgctcaaaaagctggagattgaggctgaggttgaacactccgatctctcctcggcgacgccgggcgccgccgatctgttcgtgatggcaaaagacattgcggccagcgccagcgtaccggagagccagctggtggtgatcaacaacatcatcgacatcaacgaacttgaagcgcagctgcgcgcctggttcgaaagacaataaccctgataaggcgaggtggatatgtttatccttgaaacgctgaatttcgttgtcgatattttaaaagtcccttcggtgctggtggggttaattgcgttaatcggtctggttgcgcagaaaaaatctttttcagatgtcgtaaaaggcacaattaaaacgattctcggctttattgtactgggcggtggtgccaccgtgctggtcggatcgttaaatccgttaggcggcatgtttgaacacgcttttactattcagggcattattccaaacaatgaagccattgtgtccattgcgctcgaaaaatacggtgcagcgaccgcgctgattatggccttcgggatggtggcgaatattatcgtcgcccgctttacccgcctgaagtatatcttcctgacaggacaccatacgttttacatggcgtgcatgattggcgtgatcctgacggtggcgggctttgaaggcgtagggctggtctttaccgggtcgctgatcctcggcctgatcatggctttcttcccggcgattgcgcagcgctacatgaagcgcattaccggcaacgatgagattgccttcggccacttcggcacgctgggctacgtgctgtccggctggattggcagcaaggtaggtaaaggttcccgctcaaccgaagagatgaacctgccgaagaacctgagcttcctgcgcgacagctcaatctccatctccctgaccatgatgattatctacctgattatggcggtgagcgccgggcgcgagtacgtcgaggccaccttcagcgccggtcagaactacctcgtgtacgccatcatcatggctatcactttcgcggcgggcgtgttcatcatccttcagggcgtacgcctgattctggcggaaatcgtcccggcttttaccggcttctcggaaaaactggtgccgaacgcgcgtcctgcgctggactgcccggtggtgtatccctatgcacctaacgcggtgctgattggcttcctgttcagcttcctcggcgggattgtggggttgttcatctgcggtcagtttagctgggtgctgatcctcccgggcgtggtgccgcacttcttcaccggcgcaaccgcgggcgtgttcggtaacgccaccggcggacgtcgcggggcgatgattggcgcctttgccaacggcctgctgattaccttcctgccggtcctgctgctgccggtactgggcgccattggctttgccaacaccaccttctctgacgccgacttcggcgcggttgggattgtgctcggcaacctggcgcgcttcctgtcgccgctggccatcaccgggctggtcgtggcgctattcgcgctgctggtggcttacaacgtcttcgcgaaaaacaaacctgcgggcggtaacgcgcaggaaaacaccggagccaaatcatgaatgagaaagagataaccgaactcgcgcgtcagatccgcctggagacgctgaaatccctgacgcagctgggctttggccactacgggggcagcatgtcggtggttgaaaccctggccgtgctgtacggcgcggtgatgaaaatcgacccggcggacccggactggccggagcgagactattttgtgctgtcaaaaggccatgcgggccccgcgctctacagcacactggcgatcaagggctactttccgatagaagagctgagcacgctcaaccagaacgggacgcgcctgccgagccacccggaccgtctgaaaacgcgcggcgtagatgctaccaccggttcgctgggacaggggatttccatcgccggcggcatggcgctgtcgcacaggctggcagggcggccgaatcgggtcttctgcatcgtcggcgacggcgagctgaacgagggtcagtgctgggaagcgttccagtttattgcccaccatcgcctgaacaacctgacggtgtttgtcgactggaacaaacagcagctcgacggcgagctggatgagatcatctgcgcgttcgacctcgagggcaaattccgcgcctttggctttgacgtggtgacggtcaagggggacgacattccggcgctgctggcggtgacgtcgcgggtcccggctgccgatgcgcgtccgttagtcgtcatcctcgatagcattaaggggcagggtgtgccgtacctggaacagctcagcaactcgcaccacctgcgattgaccgcggagagcaaagcggccctcaatgagacgattcgccaactggaggcttcacatgattaaggttgcaccggcaggacagaaagacgccgttgagatgcgtaaagtttacgcgggcttcgtggcaaagcagattgaggccggaagcgacatcattgcgcttgaagccgacctgatgagctcgatggcgatggacggcgtggcgcgcgattatccgcagcacgtgattaactgcggcattatggaagctaacgtcatcggcacggcagccgggctgtcgcttaccggccgcaagccgttcgttcacaccttcaccgcctttgccagccgccgctgctttgaccagctgtttatgtccctcgactatcagcgcaacaacgtgaaggtgattgcctcagacgcgggcgtgacggcctgccacaacggcggaacgcatatgtcgtttgaggatatgggcattgtgcgcgggctggcgcattcggtggtgctggaagtcaccgatgcggtgatgtttgaggacgtcctgcgccagcttatcgatctcgacggcttctactgggtgcggaccattcgtaagcaggcgccgagcgtgtatgcgccgggctccaccttcaccattggaaaaggtaacgtgctgcgcgaggggagcgatatcacgctgattgccaacggcatcatggttgcagaagcccttgaggcggcgcggcagcttgagcaggagggcgtcagcgcggcggtcatcgacatgtttaccctgaagcccatcgaccggatgctggtgaaaaactacgccgagaaaaccgggcgcatcgtgacctgtgaaaaccacagcattcacaacgggctggggtcggcggtagcggaagtgctggtggaaacctgtccggtgccgatgcggcgggtcggggtcaaggagcgttacggccaggtgggaacgcaggatttcctgcagaaagagtatggcctgacggcacatgacattgtatcggcggcgagagagctgctgtaaataaaaaaggcgaccagttaagtggtcgcctttttgttgcccggtggcgctagcgcttaccgggcctacggttttgtaggccggataagcgaagcgccatccggcaatacattactgctgctgcgaagactggatcgctgtcagcgcgatggtgtaaacgatatcgtctaccagtgcgccacgagacaggtcgttcacaggtttgcgcatgccctgcagcattggcccgatggagatcaggtcggcagaacgctgtaccgctttgtaggtggtgttaccggtgttcagatccgggaagatgaacacggtagcgcgacctgcaaccggcgagttcggcgctttggattttgcaacgtcagccatgactgcggcatcgtactgcagcgggccgtcgatcatcagatcagggcgtttttcctgcgcaatacgggtcgcttcacgcactttctctacgtcgctacctgcaccagatgtgccggtggagtaggagagcatcgccacgcgcggctcgataccgaaagcggtcgcggagtctgcggactggatagcgatctcagccagctgctctgcggttggatccgggttgatcgcgcagtcgccgtaaacgtaaacctgttcaggcagcagcatgaagaacacggaagacaccagagagctgcctggcgcggttttgatcagctgcagcggtggacggatggtgttcgccgtggtgtgaaccgcaccggaaaccaggccgtcaacttcgtcctgctccagcatcagcgtgcccagcaccacgttgtcttccaattgctcacgcgcaacggcttcggtcatgcccttgctcttacgcagctcaaccagacgggcaacgtagctttcgcgaaccacttccgggtcaacaatttcgatgccagcgcccagctcaacgccctgagaggccgctacgcggttgatctcatccgggttacccagcagcacacaggtcgcgatgccgcgctctgcacagatagccgccgctttaacggtacgtggttcgtcgccttctggcagcacaacgcgtttgcccgctttacgcgccagctcggtcagctggtaacggaaggctggcggagacagacggcggctgcgctcggaggtcgcggtcagggattcgatccagtctgcgttgatgtagcccgcaacgtattcctgaactttctcgatacgctcgtggtcatcaaccggcacttccaggttgaagctctgcaggctcagggaggtctgccaggtgttggtgttcaccatgaagaccggcaggccggtagcgaacgcgcgttcgcacagcttgctgacgcgtgggtccatctcgtaggcaccggtcagcaggatcgcaccgatttccacgccgttcattgcggccagacaggctgcaaccagcacgtcaggacggtctgcggaggtcaccagcagggaacctgcgcggaagtgttccagcatgtgcggaatgctacgcgcacagaaggtcacggacttcacgcgacgggtgttaatgtcgccttcgttaatcacggtcgcgttcaggtgacgcgccatgtcgattgcacgggtggcaatcagatcgaagctccatggcaccgcgcccagaaccggaagcgggcttgattcctgcagcttagccgggtcaactttgatgactttcgctttggacgagtcgtcgaagatctcggacaggtcagggcgagtacggccctgctcatccactggcgcgttcagcttgttgacgatcacgccggtgatgttggtatttttcgcgccgccgaagctgctgcgcgtcagttcgatacgctcgttcagctgttccggggtgtcagtgccctgagacatcacgaaaacgatctctgcgttcagggttttcgcgatttcgaagttcagagactgggcaaactggtgtttgcgggttggaaccagaccttcaaccagcaccacttccgcgtcttgcgcgttagcatggtagttggcgatgatctcttccatcagcacgtctttctggttgctggacagcagagattcaacgtggctcatcttcagcggttcggccgccggcagattggagttcttgcgaacgatggtggtggtctggtctggtgcatcgccaccggcacgtggctgggcgattggcttaaagacgctcagacgaacgcctttgcgttccatagcacggataacgccaaggctgacgctggtcaggccgacgctggttccggtagggatcagcataatagtacgggacacggtttatcctctttcgttaccgcccaaatcgggcgggttacaaaacagcaccgccagcattgctggcggtgtggaatcaggcagtcaggcggtgcgcgtcttgcgcgatgaccagttcttcgttagttgggataacgagagcagggcgggtgccttctttgttgatgaagccagacttgccgaagcgggcagccaggttacgctcgtgatcaacgtcgaagcccagaacgcccagtttgcccagggacagttcacgaaccattgccgcgttctcaccgataccaccggtgaagataaccgcgtccagacggccttccatcagcgcagtgtaagagccgatgtatttcgccagacggtggcagtaaacgtccattgcacgtttagcgtcttctttctctgcgtagttgtcttcaacgtaacggcagtcgctggtgacttcggtcagacccagcaggccagactctttggtcagcattttgttgatctggtcaacgctcatgcccagggtgtcgtgcaggtggaagattatcgccgggtcgatgtcaccggaacgggtacccatcaccagaccttccagcggggtcagacccatggacgtatcaacacatttaccgttgcggatagcagaaacagaaccaccgttgcccaggtggcaggtgatgatgttcagttcttcaaccggcttgttcagcacttttgccgcttcctgagtcacatagaagtggctagtgccgtgcgcgccgtaacgacgtacgccgtgctctttgtacaggctgtatggcagggcatagaggtaagactcttccggcatggtctgatggaacgcggtgtcgaatacggccacgtttttgtctttcagattcgggaaggatttcagcgcttcagcgataccgatcaggtgagccgggttgtgcagcggtgcgaaagaggcagagtctttgatgccctggatcacagagtcgtcgatcaccacggagctggtgtatttttcgccgccgtggacgatacggtgaccaatcgcagtcagctgagcagacagttctggtttttgtgccagaatagtgttaacgataaagttcagcgcttcactgtgagcggcgcctgcacctaaagccgcttcttgtttgctgccgtccatcttccacttgatacgtgcttcaggcagatggaaacattcggccaaaccagagaggtattcgtcaccgttgagcgcatcgatgatggcgaatttcagtgaggagctaccgcagttcagaaccagtactaacttactcgacatggaagtacctattattgatacgtggctaaaaaaacgtcagtgagtctaacagcgtaacgcatgatgacccggacatttatgattaacatcatgccaaacgaacattgtggcatgatggaagaaataactatgattttatgccattttgcacaattttcagccaatggcataatatgcaataatttgacgagctaatgattctcgtctaaggccctatcaggctggcacaggatacccgatacggggtagtgatgacaaaatattttgaacgttgtcatagcttgttgtggttttgcacgaaaattttaatttttatatgtgaagttgaggtacagccatgtcgacaccagagaacccgtccgttaatttctttagcctgtttcgtcggggacagcattacgcaaagacgtggccgatggaaaagcgccttgcgccgatgtttattgagaatcgcaccatccgcgccacgcgctatgcgattcgctttatgccgcctgtcgctatctttacgctgtgctggcagattgcgttgggtggacagcttggtcctgccgttgccacggcgctcttcgcattaagcctgccaatgcagggcctgtggtggttaggtaaacggtccatcacgccacttcccccttctattttacactggttttatgaagtgcgcggtaaactggaagaggccgggcaggcgctcgccccggtggaaggcaagccggattaccaggcgctggcggacacgttaaagcgtgcatttaagcaactggataaaacattcctcgatgacttgtgattgatcatcgaaacgaccaagaaaagagggcacagtaacaatcagttaccgtgtcttttttttaagtgcaatgcgctacaggagtcgaaagatggaaatgacccatgcccaacgtctgattttgtctaaccagtacaagatgatgactatgcttgatcccgataacgctgcgcgctacagccgcctgcaaaccatcgtcgaacgcggctttggtctacaaatgcgcgaactggaccgcgagtttggcgagctgaaagaagaaacctgtcgcatcgtgatcgacattatggagatgtatcacgccctgcatgtgtcctggacgaatctcaaagatcagcagtccattgacgagcgccgcgtgaccttcttaggttttgatgccgcaacggaagcgcgttatctgagctatgtgcgcttcatggtgaatacggaaggacgttatacccactttgacgcgggcacccacggcttcaacgcgcagaccccgatgtgggataaatatcagcgtatgctgagcgcgtggcacgcctgcccgcgtcagtaccatttaagcagcaacgaaattcaacaaatcattaatgcctgacggaggtgcgtgtgcagtgtagaggttttctgtttgatctggacggtacgctggtggactcgctgccggttgtggaacgttcctggtgccattgggctgacagacatggcatcgaccatcaggacgtgctgaattttatccatggcaaacaggccatcacctcgctacggcacttcctggccggacgctctgacgaggacattcagacggagttcaagtacctggaacacattgaagccaccgatacggacggcatcaccgcgttaccgggcgcgcgcgaactgcttgagcatctgaacgaggcgcagattccgtgggctatcgtcacctccggttccgtgccggtggcccacgcccggcacaaggctgcagggttgcaaacgccggacgtgtttatcacggcggagcgcgtgaagcggggtaaaccggagcctgacgcatttttactgggcgctgaactgctgggcctggaccccgcagagtgcgtggtggtggaagatgcggcggctggcgtactggccgggctgaacgcaggaagccacgtcatcgccgttaacgttcctgcggaatctccccgcctggacgaggcagacctggtgctggattcactgacggcactctctgtttcaaaagcctctgacggagttgtaaccgtctcgctaaaaatgtaatcccatgatatggccccacattgctggggcttttttatggcaaaattcctcatcttccactgacaaggataggttgtgaacggtgaactgatttgggtcctgagcctgcttttaatcgccatcattctttttgccacgggcaaggtacgcatggacgccgtcgccctgtttgttatcgtcgcatttgtgctcagcggaacgctgacgctgccggaagcgttctccggatttagcgatcccaacgttatcctgattgccgccctgtttatcatcggggatggtctggtgcgcaccggcgtagcgaccatcatgggggcgtggctggtaaaagtggcgggcagcagcgaaaccaagatgctgatctacctgatggtgaccgtcgccgggctgggggcgtttatgagctccacgggcgtggtcgctatctttatcccggtggtgctgagcgtctccatgcggatgcagagctcgccgtcgcgcctgatgatgcccctgagctttgccgggcttatcagcggcatgatgaccctggtggcaacgccgccgaacctggtggtcaacagcgaactgatccgggaaggatttgagggctttagctttttcagcgtcaccccgcttgggctggtcattctggtcatgggcgtggtctacatgctgctgacccgttttgccctgaaaggtgaaaaacaggacaaaaataaagaaggatggaagcgacgcaccttccgcgatctgattaaggagtaccgccttaccgggcgcgcgcgccgtctggcgatccggcccggctcgccgatggtggggcagcggcttgatgacctgaagctgcgtgagcgctatggcgcgaatgtgatcggcgtagagcgctggcgacggtttcgccgggtgatcgtcaacgtcaacggggtgtcggaattccgcgcgcgtgatgtcctgctgattgatatgtccaccgcggatgtggacctgcgcgagttttgcagcgaacagctgctggagccgatggtgctgcgcggggagtatttctccgatcaggcgctggatgtcggcatggccgaggtgtcgctgatcccggagtcggaactgctgggtaaaaccgtgcgggagatggggttccgcacccgctacggtctgaacgtcgtggggctgaagcgcgatggcgtagcgatggaaggggcggtggtggatgagccgatcctgctgggcgatatttttctcgtcgtcggtaactggaagctgattagccagctcgggcaaaaagggcgtgattttgtggtgctcaacatgccggttgaggagagcgacgcgtcgcctgcgcacagccaggcgccccatgcgattttttgcctggtattgatggtggcgctgatgctgaccgatgagatccccaatccggtcgccgcaatcatcgcctgcctgttgatgggtaaattccgctgcattgacgccgaaagcgcctataaagccattcactggccgagcatcattctcattgtcgggatgatgcccttcgccctggcgctgcaaaaaaccggcggggtaaatctgatcgttaaaggcttaatggacgtgggcggcgggtatgggccatacatgatgatggtctgcctgtttatcatgtgcgccaccatcggcctgtttatctcgaacaccgcgacggcggtactgatggcacctatcgccctggcgatggcgaagtccatgggcgtatcgccgtatccgtttgcgatgatggtggcgatggccgcttccgcggcgtttatgacgccagtttcttcaccggtgaatacgctggtgctggggcccgggaactaccggttcagcgatttcgtgaagctgggcgtgccgttcaccgtgctggtgatggtggtgtgtgtggtaatgataccggtcctgttcccgttctgagcatcctgccgggtggcggctgcgccttacccggcctacaagcccgtagtccctgcaagcgcagcgccgctgggcgaaaatcagaggggagagtcctggctgatctcatccagcgataaatggaagctcggtacaaacacctgcataaagtaatccatctcttcgctgcggcgggattccagcgttttttccaggcgcgttttcgccagcaagaattcgttattccctgcggacaactcttcgagacacttcagataggcacacagcgcgtcggcctgtttgaccagcgacttctcctcttccgtgtactgatgctcgttgataagcggctcgaaaatatcacgaagctcttcgggcaccatctcaatcagcttctgctgggcaattttctcaatggccttatattcctgcgcaatctgcgaattgaaatatttcaccggcgtaggcaggtcgccggtcagcacttctgacgcatcgtggtacatcgccagcagggcaatgcgttccgcattaacctgaccgttgaatttgcggtttttaatggcggcaagcgcgtgagcgaccatcgcaacctgcagactgtgctctgacacattttccgtacggacattgcgcatcagcggccagcggttgatgagtttcaggcgggagaggtgggcaaagaaatgactctgactcataggttaccttttgtcttcactgcgacaggcgttcattgtgcggggaggggaggcaagatgcaaatttgcggattttgcaggccgggtaagcgcagcgccacccggcagaaaggcaacgttactgatggtatccggagaggaagcggccgaaacggctgatggccatttccaggtcatcttcgcgcggcagcgtcacgatacgcacgtgatccggccacggccagttaaacgccgtgccctggaccagcagcactttttcctgcagcaggaaatcgagcaccattttctggtcgtcgtgaatattgaagcgctttgcgtcaattttcgggaacatatagagcgccccgttcggcttcacgcaggagacgcccgggatatcgttgatcagctcccacgcgcggttacgctgttcgtacaggcgtccaccgggcacgataaactcgctgatgctctgatagccgccgagcgcggtctggatcgcgtgctgcgccggcacgttggcgcataaacgcatggaggccagcatctccagcccttcaatatagcctttggcgtgctttttcggaccgtttaacaccatccagccctggcggaaaccagccacgcggtaggttttggacaggccattaaaggtgacggtcagcaggtccggggccagcgcggcgatggaatggtgctgcgccgcgtcgtagaggatcttgtcgtaaatttcgtctgcaaagatgatcaggttgtgctggcgggccagctcgacgatctccatcagcagctcttttgagtagaccgcgcctgtcgggttgttggggttaataatgacgataccgcgcgtgcggggcgtaatttttgcgcgtatatcatccaggtccgggaaccagtcggaggattcgtcgcacagataatgcactgctttaccgctggacagtgatacggcagccgtccacagcggatagtccggcgcgggtaccagcatttcgtccccgctgttcagcagggcctgcattgcctgcacaatcagttcggagacgccgttgccgatatagatatcttcaacggtaacatcacgcataccgcgtgcctggtagtgctgcataatggctttacgtgcggagtaaagtccttttgaatcgcaatagccttgtgcagtcggaaggttgcggatcacatcaaccagaatttcatccggcgcttcaaaaccaaatggcgcagggttaccaatgttgagtttcagaaccttgttgccttcttcttcaaggcgttttgcctctttcagaaccgggccgcggatgtcataacagacgttatctagcttgctggatttttcgataggggacatgaacctttaaccttttcgctattattgccgctccctgccgtggaagtcagcacggaataatgtactcccccctcgcttcgttttgaagggtgtgcaggagaagattttgtgcccggagaaaattattgatgaatctttttcgctgcgcgtacgctttttcactgtcttaaagttgcgcgcttagcgagaggttaggttaaatgtgctatccatttgccaaaatactgtataatgtgctgttaaaaataagtggtaagctggacagaggtggcaatcaccctgagtgacttttcgtaaaacctgaatgcttgatacctgtttctgtaatagcatactgtggataaaagttactcatgtgaaattaatgttaagtgccattaatgaatagtcttaatctaaattaaaatttatttattattaacctataaaatgcaactttagttaattttaataaaattagtttagaagcttaacattcttctttaatccttaatattgcaataagacttaaaaataaagtggatttgggttaagatgtcttcaaggaaagcagaggacagatgcacgttttttgtatatctgacactggttttctgaattaattgattgttattgttagagttatctctggctggaatgtgtcgcacatctcctgctacgttgacagcgctgcgatacagatggcagaaaaggtgttatacctttaatgtaatttacataaacctgcgaacatctaaatatcctgaacgtttaagagaataaaaataacgtcatgaaacgtgctttctgactgttgatataaagcagcacaataactatctgtcaggcagtctgccgggccgggatgcgagggaaaatcttcagagggaattgcttaactgtacacacacagcttcaacccgggcagctccgcacgagcaacctgaaagtgaatagatatgataaatgcaaatcgtccgataatgaatctcgacctcgatctgctgagaacgtttgttgcggtcgccgatctcaacacttttgcagcagctgctgccgccgtttgccgaactcagtccgccgtcagccagcaaatgcagcggctggagcaactggttggtaaagagctatttgcccgtcacgggcgtaataagctcttaacggaacacggtattcagcttctgggttatgccaggaaaattcttcgctttaatgatgaagcatgtatgtcattaatgtttagcaaccttcagggcgtgctaacgttaggtgcatctgatgagtcggcggatactatattgccgtttcttctcaatcgcatcagttcggtttatccgaagcttgcgctggacgttagcgtaaagcgtaatgcttttatggttgagatgttaaatgagaataaagtcgacctggtggtcaccacgcatcgtcccgggcagtttgattgcctgacgctgcgtacatcacctacgcactggtattgcgcggccgaatacgtgctgcaaaaaggcgagccggtgccgctggtgttactggatgacccgagcccgttccgcgatatggtgctgacggcgctgaatgaggccaatattccgtggcgtctggcgtatgtggcgtccacgctgccagcggtgcgtgccgccgtgaaagccggtctgggtgtcaccgcccgcccggtagaaatgatgagccccgatctgcgcgttctgggaaaatctgatggcctgcctgcgctgccggatacggaatatctgctctgccacaattcgtccagccataacgagctggcaaaggtggtgttcgaggcgatggaaaactaccataacccgtggcagttcgagcgcgttacctccgaagggggggatgattccctgatcgttgaaggggattttgagtgatcgccagctcaaaattctggtaacaaaatgtaagtgtaaaaaaaagccactcgtgtgattttcacatgcagtggcttttttttagcaataatacccgcgtatgccgcgtggatttccgggatatcctctatttatcaataagctaaatgcttttgattaaaactcatccgttttccgttctaacttcatccatatcccccctatgttaaaaaaacaggaaatatgttgccgttttccaggttgaattaacaaaagcgtgtcgcagatcaagaaaatactcctatttggggggaggaatcgttggcaaatcctgtcaaaataggagggttattttttttacttccgaaacggacacgattcaacaacatacatttgacggaaagtcatgtacccaccagggttaaagggcaccaaatgttaatgagaatcgctcgatgtaatttaatgtgaagaaacctttgttaaagttgacaataggttatagaaaggagtaaaaaaccccatcattttgctgtctacgtctcatttctgacagttagtgtaaggttatttgttcctccccatgaatcgatgtgatgcccatctgccagcaagagcagtgtcgttggtatcacttttgatgagtaagcaatgagtatgtcaacatccacagaagtcatcgctcatcactgggcattcgcaatctttcttattgtagccattggcctgtgctgcctgatgttagtcggcggctggttcctgggcggtcgcgcccgtgcaaggcacaaaaacacacctttcgaatcaggtattgattcagtaggtaccgctcgcttacgcctgtctgccaagttttacctggtagccatgttcttcgtcatcttcgacgtggaagcgctttacctcttcgcatggtctacctccattcgcgaaagtggttgggtgggctttgtcgaggccgcaattttcattttagtgctactggccggtctggtttatctggtgcgtattggcgcgcttgactggacgcctgcgcgttcacgtcgtgaacacatcaacccggaaaacagtatctctaatcgtcagcagtaacagcgaggcaataagatggattatacgctcacccgcatagatcctaacggtgagaatgaccgttaccccctgcaaaaacaggagatcgtaaccgaccccctggagcaagaagtcaataaaagcgtgtacatgggcaaactcgaacatgccatgcacgatatggtcaactggggtcgtaagaactccatctggccttacaactttggcctttcttgctgctacgttgaaatggtgacgtcattcactgcggtgcatgacgttgcgcgttttggggcagaggtactgcgtgcttccccacgtcaggctgacctgatggtggtggccggtacctgctttaccaagatggcacctgttattcagcgtctttatgaccagatgctggagccaaaatgggttatctccatgggcgcatgtgctaactctggcggtatgtacgacatctattccgtcgtacagggcgtagataaatttatcccagtggatgtgtacatcccgggttgtccgccacgtccggaagcctatatgcaggcgctgatgctgctgcaggagtccatcggtaaagaacgtcgcccactgtcgtgggtcgttggcgatcagggtgtgtatcgcgcgaacatgcagtctgagcgcgagcgtaaacgtggtgaacgtattgccgtcaccaatctgcgtacgcctgacgaaatttaatttgcgcctgtaggcctggagaacaccttcgcatatcactactcaaatagcgcgaagccaggctcaacagtcaccacggaccatttgcaatggtgaacaatatgaccgacttaaccgcgcaagaagccgcctggcagacccgggatcatctggatgacccagtcattggcgaactgcgcaaccgttttgggccggatgcctttactgttcaggctacccgcaccggggtacccgttgtttgggtgaagcgtgaacaattgctggaagttgtcgatttcctcaagaaattgccaaaaccatacgtcatgctgtttgacttacacggcatggacgaacgtctcagaacgcaccgccagggtctccctgctgcggatttttccgttttctaccacctgatctcaatagaccgtaatacggatatcatgctcaaggtggcattgtctgaaaacgacatgcatctgccgacgatcaccaaacttttcccgaacgccaactggtacgagcgtgagacatgggaaatgttcggcatgaccttcgacggccatccacacctgacgcgcatcatgatgccgcagacctggaccggccacccgctgcgtaaagactacccggcacgtgctaccgaattcgatccgtttgagctgaccaaagccaagcaggatctggagatggaagcgctgaccttcaaaccggaagactggggcatgaagcgcggtaccgacaacgaggacttcatgttcctcaacctcggtccgaaccacccgtctgcgcacggtgctttccgtattatccttcagcttgatggcgaagagattgtcgactgcgtgccagacatcggctaccaccaccgtggtgctgaaaagatgggcgagcgtcagtcctggcacagctacattccgtataccgaccgtatcgagtacctcggcggctgcgtcaacgaaatgccatacgtgctggccgttgagaaactggcaggcattaccgtgccggatcgcgtaaacgtgattcgcgtcatgctgtcagaactgttccgtatcaacagccacctgctgtacatctccacgttcattcaggacgtcggcgcgatgaccccggtcttcttcgcctttaccgatcgccagaaaatttacgatctggtagaagccattaccggtttccgtatgcacccggcctggttccgtatcggcggtgtggcacacgatctgccgcgcggctgggaccgtctgctgcgtgaattcctcgactggatgccgaaacgtctggcgtcttacgagaaagccgcgctgcgcaacaccatcctgaaaggccgttcccagggcgttgctgcctacggcgcgaaagaggcgctggagtgggggacgacaggggcaggtctgcgtgcgaccggtattgatttcgacgtgcgtaaagcccgtccttactctggctacgagaacttcgactttgaagtcccggtgggcggcggcgtttccgactgctacacccgcgtgatgctgaaagtggaagagctgcgccagagtctgcgcatccttgagcagtgcctcaacaacatgccggaaggcccgttcaaggcggatcacccgctgaccacgccgccaccgaaagagcgcacgctgcaacatatcgaaaccctgatcacccacttcctgcaggtttcctggggtccggtcatgccggcgcaagaatccttccagatgattgaagcgaccaagggtattaacagttactacctgaccagtgacggcagcaccatgagctaccgtacccgcgtgcgtacgccgagctttgcgcacctgcagcagatcccgtccgccatccgcggcagtctggtctccgacctgattgtgtatctgggtagtatcgattttgttatgtcagatgtggaccgctaattatgcacgagaatcaacaaccacaaaccgaggcttttgagctgagtgaagcagaacgtgccgccattgagcacgagatgcaccactacgaagacccgcgtgcggcgtccattgaagcgctgaaaatcgtacagaaacagcgtggttgggtgccggacggggcgatctatgcgatcgcgaaagtgctgggtattccggcaagtgacgtagaaggcgtagccacgttctacagccagatcttccgtcagcctgtaggccgccatgtgatccgctactgtgacagcgtggtctgccacattaccggttaccagggcattcaggctgcgattgagaagaagctcaatatcaagccgggccagaccacgttcgatgggcgctttactctgctgccaacctgctgtctgggtaactgcgacaaggggccgaccatgatgattgatgaggacactcacagccatctgacgccggaagcgattcctgacctgctggagcagtacaaatgaaaactgtaattcgtactgctgagacgcatccactgacctggcgtctgcgtgatgacaaacagccggtatggctcgacgaatatcagagcaaaaacggctatgccggtgcgcgtaaagcccttggcggcatggcgccggacgacatcgttaacgcggtaaaagagtctggcctgaaaggccgcggcggcgcgggcttctccaccggtctgaagtggagcctgatgccaaaagacgaatccatgaacatccgttacctgctgtgtaacgccgatgaaatggagccgggtacctataaagaccgcctgctgatggagcagctgccgcacctgctggtggaaggcatgctgatctccgcgttcgcgctgaaagcgtaccgtggctacatcttcctgcgcggtgagtacatcgaagcggcagaaaacctgcgtcgcgcgattgccgaagccaccgaagcgggactgctgggcaaaaacattctcggcaccgggtttgacttcgaactgttcgtgcacaccggtgccgggcgttatatctgcggtgaagagaccgcgctgattaactccctggaaggccgccgtgcgaacccgcgttccaagccgccgttcccggcaagctccggcgtgtggggtaaaccgacctgcgtcaacaacgtcgagaccctgtgcaacgttccggctatcctcgcgaacggcgtggagtggtatcagggcatctcctcaagcaaagatgccggtaccaagctgatgggcttctccggtcgcgtgaaaaatcctggcgtctgggaactgccgttcggtactaccgcacgtgaaattcttgaagactacgcgggcggcatgcgcgatggcctgaaattcaaagcctggcagccgggtggggcagggactgacttcctgaccgaagcccaccttgacctgccgatggaattcgaaagcattggtaaagcaggcagccgtctgggtacggcgctggcgatggccgtcgaccacgagatcggcatggtctcgctggtgcgtaacctggaagagttcttcgcccgtgagtcctgcggctggtgcacaccgtgccgtgatggtctgccgtggagcgtgaagatcctgcgtgcaatcgaacgtggcgaaggccagcctggcgatatcgagacacttgagcaactgtgtcgattcttaggcccgggtaaaaccttctgtgcccacgcaccgggtgccgtcgaacctctgcagagcgcgatcaaatatttccgcgacgagttcgaagcaggcatcaagcagccgttcagcaatacccatgcgattaatgggattcagccgaacctgcttaaagcgcgctggtaacgacaagaattttgattaacgctcggtttcgaccgagccaactggaagcatgctaatggctacgattcatgtagacggcaaagaatacgaagtcaacggggctgacaacctgctggaagcttgtctgtctcttggcctcgatattccgtacttttgctggcatccggcgctgggcagcgtcggtgcttgccgccagtgtgcggtgaagcaatatcaaaacgcggaagacacgcgtggtcgcctggtgatgtcctgtatgacgccagccaccgaaggcacctttatttcgattgatgacgaagaagccaaacagttccgtgaaagcgttgtggaatggttgatgaccaaccacccgcacgactgcccggtctgtgaagagggcggtaactgccaccttcaggatatgaccgtgatgaccggtcacagcttccgtcgctatcgctttaccaagcgtactcaccgtaaccaggacctggggccgttcatctctcacgaaatgaaccgctgcatcgcctgctaccgctgcgtgcgttactacaaagattacgcagacggtcaggatctgggcgtgtatggcgcacatgacaacgtctacttcggtcgtccggaagacggtacgcttgagagcgaattctccggtaacctggtggaaatctgtccgaccggtgtattcaccgataaaacccactccgagcgttacaaccgtaagtgggacatgcagtttgcgccaagcatctgccagcagtgttcgctgggctgtaacaccagcccgggtgagcgctacggcgaactgcgtcgtatcgaaaaccgttacaacggtaccgtaaaccattacttcctgtgcgaccgcggtcgtttcggctatggctatgtgaacctgaaagaccgtccgcgtcagccggttcagcgccgtggcgacgacttcatcaccctgaacgctgaacaggcgatgcagggtgcggcagatattctgcgtcagtcgaagaaagtgatcggtatcggttccccgcgcgccagcatcgaaagcaacttcgcgctgcgtgagctggtgggggcggaaaacttctacaccggtatcgctcagggcgagcaggaacgtctgcagctggtactgaaagtgctgcgtgaaggcggtatccatacccctgcgctgcgcgaaattgaatcctatgatgcggttctggtgctgggtgaagacctgacgcagaccggcgcacgcgcggctctggcggttcgtcaggcggtgaaggggaaagcacgtgaaatggcagcggcgcagaaagtggctgactggcagattgcggcaatcctgaacatcggccagcgcgcgaagcaccctctgtttgtgaccaacgtcgacaatacccgtctggacgatattgcggcgtggacctactgcgcaccggttgaagatcaggcgcgtcttggctttgccattgcccacgcgctggacaacaactcaccggccgttgatctggatcgcgacctccaaaacaaggttgacgtgattgttcaggccctggccggtgcgaagaaaccgctgattatttccggtaccaacgccggtagcgcagagatcattcaggccgcagccaacgtggccaaagctctgaaaggccgcggtgctgacgttggcgtgaccatgattgcccgtgcggtgaacagcattggtctgggcatgattggcggcggctcgctggaagctgcgttaagcgaactggaatccggtgccgctgacgccgtggtggtgctggaaaacgacctgcatcgtcatgcttctgccgcgcgtgtcgacgctgcactctctaaagcgccgctggtgatggttatcgatcatcagcgcaccgcgattatggataaagcgcacctggtgctctctgcggcaagcttcgcagaaagcgacggtacggttatcaacaacgaaggccgcgcacagcgtttcttccaggtttatgacccgtcttactacgacagcaacaccgtgatgctggaaagctggcgctggctgcactccctgcacagcaccgtgcagagccgtgaagtggactggacgcagctcgaccacgttatcgacgcggtagtcgaaaaactgcctcagctggcaggcattaaagatgccgcgcctgaagcgagcttccgcattcgcggccagaaactggcgcgtgaaccgcaccgttacagcggccgtaccgcaatgcgcgccaacatcagcgtgcacgaaccgcgccagccgcaggataaagacaccatgttcgccttctccatggaagggaacaaccagccgtctgcgccgcgttcgcaaatcccgttcgcatgggcaccgggctggaactccccgcaggcatggaacaagttccaggctgaagtgggcggctccctgcgccacggcgatccgggcgtgcgtctgattgaagcttccgaaaccggtctggacttcttcaccaccgtaccggcgagcttccagccgcaggacggtagctggcgtattgccccgtactaccacctgttcggtagcgacgagctgtcccagcgttcaccggtcttccagacccgtatgccgcagccgtacatcaagcttaacccggcggacgccgcgaagcttggcgttaacgcgggtgcgaacatcgcctttagctatgacggccagaccatcagcctgccgctgattatttctgaaagtctgacagcagggcaggtcggtctgccgatgggtatgcctggcatcgcgccggttctggcgggtgcgcgtcttgataatctgcaggaggcaaaagcatgagttggttaacgccggatcttatcgacatcctgctgagcattctgaaagcgattgttatcctgctggtggtggtcacctgcggcgcgttcatgagctttggtgaacgtcgtctgctcggtctgttccagaaccgttacggaccgaaccgcgtgggctggggtggttcactccagctggtcgcggacatgatcaagatgttctttaaagaggactggatcccgcgcttctcggatcgcgtgatctttactctggcaccgatgatcgccttcacctcgctgctgctggcgtttgctatcgtgccggtcagcccgacctgggtggtcgctgaccttaacatcggcattctgttcttcctgatgatggcaggcctcgcggtttacgcagtcctgttcgcaggctggtccagtaacaacaaatactcgctgctgggtgcgatgcgtgcgtccgcgcagaccctgagctacgaagtgttcctggggctctccctgatgggcgtggtggcgcaggccggttcattcaacatgaccgacatcgtcaacaaccaggccgacatctggaacgtgattccgcagttctttgggtttattacctttgccatcgcgggcgtggcggtgtgtcaccgtcacccgtttgaccagccagaagccgaacaggaactggccgacggttaccacatcgaatattccggtatgaaattcggtctgttcttcgtgggcgagtacatcggtatcgtcaccatttccgcgttgatggtaacgctgttcttcggtggctggcatggcccgttcttaccgccgttcatctggttcgcgctgaaaaccgcgttcttcatgatgatgttcattttgattcgcgcagcgttaccgcgtccgcgttatgaccaggtaatgtccttcggctggaaagtgtgcctgccgctgacgctcgtcaacttgttggtaacggccgctgtcattctctggcagcagccataaggggcaatagaccatgaccttaaaagaattactggtaggcttcggtacccaggtacgcagtatctggatgatcggcctgcacgcgtttgccaaacgcgaaacccggatgtacccggaagagccggtatatctgccgccgcgctaccgtggccgtatcgtgctgacgcgcgacccggacggttccgagcgctgcgttgcctgtaacctgtgtgcggtagcgtgcccggttggctgtatctctctgcagaaagccgagacggtagacggccgctggtaccctgagttcttccgcatcaacttctcacgctgcattttctgcggtctgtgtgaagaagcgtgcccaaccacggcgattcagctgactccagacttcgagctgggtgagtacaagcgtcaggacctggtgtacgagaaagaggatctgctgatttccggtccgggcaaatacccggaatataacttctaccggatggcgggtatggcaatcgacggcaaagataagggcgaagcggagaacgaagccaagcctatcgacgtcaagagcctgttaccgtaaggagagggcaatggaattcgctttttatatctgtggccttatcgccatcctggctacgctgcgagtgattacgcacaccaatccggtgcatgcgctgctgtacttaatcatttcgctgctggctatttccggggtgttcttcgcactgggcgcgcacttcgccggtgcgctggaaatcatcgtctacgccggggccatcatggtgctgttcgtgttcgtcgtgatgatgctgaacctgggcggctctgaaatcgagcaggaacgtcagtggttaaaaccgcaggtgtggatcggcccggcaattttgtcggccatcatgctggtggtgatcgtgtacgccattctgggtgtaaacgatcagggcatcgacggcacgccgatcggcgctaaagaggtcggtattacgctctttggcccatacgttctggcggttgaactggcctccatgctgctgctggcaggtctggttgtggccttccacgttggccgcgaagagcgtgctggcgaggtgctgagcaaccgcactgacgaccgcgcgaaaagaaaaacggaggagcgcgcatgatccccttaacacatggactgatcctcgctgcgattttattcgttctgggtctgactggtctggttatccgccgcaatctgctgtttatgctgatcgggctggaaatcatgattaacgcctccgcgctggccttcgtggtcgccggaagctactggggccagaccgatggtcaggtgatgtatattctcgccatcagccttgcggctgccgaagcgagtattggcctggcgctgttgctgcagctccatcgtcgccgccagaatctgaacatcgattcagtaagtgagttgcgtggatgaacatgcttgccttaaccattatttttccgctgattggcttcgtgctgctggcgttttctcgcggccgctggtctgagaatctgtctgcaaccgtcggcatgggctctgttggcctggccgcgctggtgacagcgtatgcgggtatcgacttctttaacaacgggcgtcagcctttcagcgtgccgctgtggacctggatgtcagtcggtgatttcaacatcggtttcaacctggtgctggatggtctctccctgactatgctctccgtggtcaccggcgtcggcttcctgatccacatgttcgcctcctggtatatgcgcggtgaagagggttactcccgcttcttcgcctacaccaacctgtttatcgccagcatggtggttctggtgctggccgataacctgctgctgatgtatctgggctgggaaggcgtgggtctctgttcttacctgctgatcggtttctactataccgatccgaagaatggcgcagcggccatgaaagcgttcgtcgtgacccgcgtgggtgacgtcttcctcgcgttcgcgctgttcattctttataacgaactgggcacgctgaacttccgcgaaatggtggaactggcgccagcgcacttcgccgcaggcaacaacatgctgtggtgggcaacgctgatgctgctgggtggtgccgtgggtaaatccgcgcagctgccgttgcagacatggctggccgacgcgatggcgggtccaacccctgtctccgcgctgatccacgctgcgaccatggttaccgccggtgtgtacctgattgcgcgtacccatggcctgttcctgatgactccggaaattctgcacctggtgggtatcgtcggtgcggtcacgctggtgctggcaggctttgccgcgctggtgcagaccgacatcaagcgcgttctcgcgtactccaccatgagccagattggttacatgttcctcgcgctgggcgttcaggcctgggacgcggccattttccacctgatgacgcacgcgttctttaaagcgctgctgttcctctcatccggttcggtgattctggcctgccatcacgagcagaacatcttcaaaatgggcggactgcgtaagtccatcccgctggtctatgtctgcttcctggtgggcggcgcggcgctggcggcactgccgctgatcaccgcgggcttcttcagtaaggacgaaatccttgcgggggccatggcgaatggtcatatcaatctgatggttgcgggtctggtcggtgcgttcatgacctccctgtataccttccgtatgattttcatcgtattccacggtaaagaacaaattcacgctcacgcagggaaggggattacccatcacctgccgctgattgtgctgctggtactgtccaccttcgttggcgcgatgattgtgcctccgctgcagggcgtgctgccggacaccaccgagcttgagcacggtcgcgttctgacgcttgaaatcacctccggtgtggtcgctatcgcgggcatcatgattgcggcatggctgtggctgggcaaacgtacgctggtcactgccgtggccaacagtgcgccgggccgtctgctgggcacctggtggtacaacgcgtggggcttcgactggctgtacgacatgatcttcgttaagccgttccttggcatcgcgtggctgctgaagcgcgacccgctgaacagcctgatgaatatcccggcgatcctttcccgctttgcaggcaaaggcctgctatacagcgagaacggttacctgcgctggtatgtggcgtccatgagcatcggtgcggttgtggtgctggcgctgctgatggtgttgcgttgatcgttaagtgaattttattcgaattcgttgaaaatcaggcccctgctgggggccttaaaaaggaatgtaaatcgccatgttactaccctggctaatattaattcccttcatcggcggcttcctgtgctggcagactgaacgctttggcgtgaagatgccgcgctggatcgcgctgatcaccatgggattgacgctcgcgcttggcctgcaactgtggttgcagggcggttactcactgacccagtctgcgggcattccgcagtggcagtctgagttcatcctgccgtggatcccacgtttcggcattacgatccacctggcgattgacggtctctcactgctgatggtggtgttgaccggcctgctcggcgttctggcggtactctgctcctggcgtgaaatcgaaaaataccagggcttcttccacctgaacctgatgtggatcctgggcggcgtaatcggcgtgttccttgccatcgacatgttcctgttcttcttcttctgggagatgatgctggtgccgatgtacttcctgatcgcgctgtggggccacaaggcatccgacggtaaaacgcgtatcacggcggcaaccaagttcttcatctatacccaggcgagtggtctggtgatgttgattgccattctggcgctggtgtttgttcaccacaacgcgaccggtacctggaccttcaactacgaagacctgctgaagaccccaatgtctcacggcgtagaatacctgctgatgctgggcttcttcatcgccttcgcggtgaaaatgccggtggttccgctgcacggctggctgccagacgcgcactctcaggcgccaacggcgggttccgttgacctggcgggcatcttgctgaaaaccgcggcctacggtttgctgcgctttgcactgccgctgttcccgaacgcctccgcagagttcgcaccgattgccatgtggctgggtgtgatcggcatcttctacggtgcctggatggccttcacccagtacgacatcaagcgtctgattgcctacacctccgtttcccacatgggcttcgtgctgattgctatctacaccggcagccagctggcgtaccagggtgcggtgattcagatgattgcgcacggtctgtccgcagccggtctctttatcctgtgcggccagctgtacgaacgtctgcacacccgcgacatgcgtatgatgggcggtctgtggagcaaaattaagtggctgccagcgctctccatgttcttcgcggtggcgactctggggatgccgggcaccggtaacttcgtcggcgaatttatgattctgttcggcagcttcaaagtggtaccggtgattaccgtgatctccacctttggtctggtgttcgcttccgtctactcgctggcgatgctgcaccgcgcttacttcggtaaagcgaagagcgaaattgctgcacaagaactgccggggatgtcgctgcgtgagctgttcatcatcctgctgctggtcgtactgctggtgctgctgggcttcttcccgcagccgattctggatacctcgcacagcgcgatgggcaatatccagcagtggtttgttaattctgtttctactacaaggccgtaattcgccatgacaataactccacaacaactgatcgcgctgctaccgctgctgatcgtcggattgacggtggtggttgtgatgctctccattgcgtggcgacgcaatcacttcctgaatgccacgctgtcggtcatcggcctgaacgccgcgttagtctcactctggtttgttggccagggtggggcgatggacgtcaccccgctgatgcgcgttgacggttacgccatgctgtataccggtctggtgctgctggcgagcctggcaacctgtacctttgcgtacccgtggcttgaaggctacaacgacaacaaagaagagttttacctgctggttctgattgccgcgctgggcggcattctgctggcgaatgcgaaccacctggccgcgctgttcctcggcattgagctgatctctctgccgctgttcggtctgattggttacgccttccgccagaagcgctcgctggaagcaagcatcaagtacaccatcctgtctgcggcggcgtcctcgttcctgctgtttggtattgcgctggtgtacgcacagtccggtaacctctcctttatggcgctcggcaagagcctcggtgacggcatgctgcatgagccgctgctgctggcgggtctgggcatgatgattgttggccttggcttcaaactctctctggtgccgttccacctgtggacgccagacgtctaccagggggcaccggctccggtgtcgaccttcctggcgacggcgagcaaaatcgccatcttcggggtggtgatgcgtctgttcctgtacgcgccggtgggtgacagcgaagcggttcgcgtggtgctgggcatcatcgcgttcgtctccatcatcttcggtaacctgatggcgctgagccagaccaacatcaagcgtctgctgggctactcgtctatctctcatctgggctacctgatggtggcgctgattgcgctgcagagcggtgagatgtcgatggaagccgtgggcgtctatctggccggctacctgttcagcagcctcggcgccttcggcgtggtgagcctgatgtccagcccgtaccgtggtccggatgccgattcactgttctcttaccgtggtctgttctggcaccgtccgatcctgtccgccgtaatgaccgtgatgatgctctctctggccggtattccgatgacgctgggcttcatcggtaagttctacgtgctggccgtcggtgtgcaggcgcacctgtggtggctgaccgcgggcgtggtgatcggctccgcgattggtctctactactacctgcgcgtggccgtgagcctgtacctgagcgcacctcagcagctcaatcgtgatgctccaggcaactggcagtacagcgctggtggtatcgtggtactcatctccgcgctgctggtgctgatcttcggtatctatccgcagccgctgattgatatcgtgcagcgcgcgatgccattaatgtaaaaacaaaaacccgcctcggcgggttttttattgcccagcgtcgctacgcttgcagggcctacgggttttgtaggtcgggtaagcgtagcgccacccgactaagccagctgtttacggctaatcaacggcccgtcaatcttcttcatcgagcggtccagcacttcctcaatcactgacgacagctcgttcagctcaaacttcgcgacgtagccatccgccttcaccttgcgaatatggtcttcgttggcgttgccggaaagggaggagtggatcaccaccggaatatctttcagaaccgggtcggttttgattttgcgcgtcagcgtaaaaccgtccatctccggcatttcgaggtcggtcagcaccagcgcgatcttatcggtgatcggcacgccctcagcctgtgcctgtgcggccagcacgccaattttttcccacgcgtctttgccggtgatgtgcagctgcgctgggatctccatcgcctgcagacctttctccagcatcgaacgcgccactttggaatcttccgccacaatcgcgaccgcgcccggcttgatattgaacttggtggtcttcagattggtggcgtgcagatcgtggttggccggggtgatgtcatacaggatctgctcaacgtccagcaccatcgccagatcgttggtatccgttttctcatccaggcaggcaatgctggtgatatagcgaccgctgacggcggtttccgccgcgtgcacctgcttccagtccagacgcatgatgttctcaaccgactccacggcaaacgcctgcacgctgcgcgcatattcggtgatcagcaggatattcagcccggtggtgggcttacagcccgccacggcggccaggtcgatcaccgggatcacctgatcgcggatattcaccattcccatcagcggtgatttcattccggcgggtttcgtgaactccggcatcggcacaatttcacgcagcttaaagacgttaatgccaaacagctcagatttattttcgttaagagaggtgccaagacggaacagcaacagttcaaaacggttcgacagggtcagattcgccctgtcatcaatatctttctggaaattatccattctaccctcgagagaaatgctgaccttttaatcgttatcggcatcctgagggaaaaatgaaggactaaacgctgacctgagcgaaatcttcggccagctcacattccgggaacagcgcgcggcactctgccagcagcttttcacagccccgcgcgtcgtagcgcgagctgacgtgggtgatgatgagcctcccgacgcccgcgtcacgggctagctgcgccgcctgacgcgtggagctatggccccggccgttggctttctcttccatcgccgtttcaagcgtcgcttcatgcaccatcacgtccacaccctgggcaagcgtgagcgccgcccggcacggggccgtgtcgccaaagatcgccagcttcttgccgggctgcggtgcggcgagataatcctgcccattgatgacgcgcccgtcctccagcgtgacggtctcgccgtgcttcaggcgctggaacagcggcccgggttttacgccatcggccattagcgcggcggcgtccagcgcgccgggtttgtcatgcgcgtcaacacggtagccatagcattccacaggatgattgagcggttgagcactaacccgataatctccgtcatcgaataccaggccttcggtaatctcaaccacctccagcggataatccgtccacgacccgctcaggcgcagcgtggtttcaacaaaatcacgaatacccgcaggcccgtaaatcgtcagcgggttggcgttaccggccatcgagcggctgcacagcaggccgggaaggccaaacagatggtcgccatgcagatgggtgataaaaattttatccagcttgccggggtgataagcggtgtgtagcagctgatgctgcgtcccttcaccacagtcaaacagccacagcccgccgcgggtggggtgtttaagatccagcagtatcgccgtcacattccgtgagcgggttggcacacccgccgacgtacccagaaaaatcagttccataacgcaatcagccctttgctgaacggggaggggtttagtataacgtgatgaaccccaggaaggagactgacatgatccagtggcaagatttacaccatagtgacctcaccgttcattcactttacgccgtgcttaaactgcgctgcgaagtgttcgtggttgaacagacctgcccgtatcaggacatcgacggcgacgatctcgtcggcgagaaccgccatatcctcggctggcggaataacgagctggtggcgtatgcgaggattctgaaaagcgaagacgattttgagcctgtcgtcattggccgcgtcatcatcagcggcaaagcgcgcggtgaaaaactgggctatcaactgatggataaaacgctggaggcatgccagaaacagtggccgaacaaggcgttatacctgggcgcgcaggcgcacctgcagtccttctacggccactttggtttcgtgccggtcaccgaagtatacgacgaagacggcattccccacgtcggcatggcgcgggaagcgaagcaggcgtaatggcgagtcgttggctatagttagcgaactggtgtactaacatggagaaaaatatgtcatttcaatcctgggatacccgtatcgacgacgacctggccttactgagcgaaacgctggaagaggtgttacgttcctcgggcgaccctgccgatcagaaatatattgagctaaaagcccgtgccgaacaggcgctgcatgaagtgaaaaaccgcgtcagtcatgcgtctgatacctactactaccgcgccaaaaaagcggtgtaccgtgccgatgattacgtgcatgaaaaaccgtggcagggtattggcgtgggggctgccgtcgggctggtgctggggctgctgttggcccgtcgttaagccgcttaaccactccctatacgtgggtactgctatttatggtcagtaccccgtataatatgaggttttaacagggagaggttcgcgtgaattcgattttcctcgcgctggagcaattgcgtacccagctttcgcaagcgttacccgcaacgcccggcatacgtcatttcgacgtctctttcccgttaaacgatgccttcgaccctctcgcctggcttggggcgcagcagtgctatccgcagttttactggcagcagcgtaacggcgatgaagagctggccgcgctgggggcggttatcaccttttcctctctggcgttagccacgcagtttttgcgcgagcaaaacgcggcaggtgatacccgcatctgcggcctgaacgcctttaatccggagcagggcagcctctttttaccgcgactgttctggcgacgtaccgccggcaccgctacgctgcgcctgcagctgtggagcgattattcacttcaggaagatgcccatgccgcgcgggattttttacagcagctccagccagccaggcctatccgcccgctggccgttcaggctgagcacgaaaaccatcagcctcaacgggccgaatggctgaaacttgtccgcagggcgaccgaagccatcgcgcgcggtgattttgaaaaggttgtccttgcgagggccaccgatcttgagtttacacagcgcattaaccccgtcgcgctgatggcggccagccgcgccctcaatttacattgctatcacttctgcatggtattcgacgccagcaacgcgtttctcggctcgacgcccgagcgtctctggcggcgacgcggcacgctgctgcgcaccgaagcgctggcgggcaccgtcgccagccataccgatgataaaaaggcgcagcgtctgggcgagtggctgctgaacgacgataaaaaccagcgcgagaatatgctggtcgtggaagatatctgtcagcgtcttcagcactctacgcagacgcttgaggtactgcctgcccaggttgtgcgcctgcgtaaggtgcagcatttgcgccgctgtatctggaccgagctcaagcaggctgacgacgagcagtgtctgcatatgctacagccgacggcggccgttgccggtttgccgcgacagcctgcgcgcgagtttattcagaaggttgagccctttaaccgcgagtggtacgccggttcggccgggtatttatcgcctgaccagagtgagttctgcgtggcgttgcgctccgcccgcgtccaggatgactccctgcggctctatgccggcgccggtattgtcagcggatctgacccggagcaggagtggcaggagattgaaaacaaagcggccggattgcgctctctgctcctaagggattaatactgaatcgtgcaatcccgattcacatcaaaattccaattttttctattatttatactgtgtcgcattcttgataccggacaatctcatgtcagtaagttcttttaaccgacgctgggcggcggtgatccttgaagccctgacgcgccatggcgtcaggcacgtgtgtattgcaccgggttctcgctcaacgccgctgacgctggcggccgccgaaaaccgggcgttgattcaccacacccactttgatgagcgcggcctcggtcatctcgcgctgggtctggcgaaagccagcaaagagcccgtggcggtgattgtcacttccggtactgccgtggcgaacctctatccggctctgattgaagccgggttaaccggtgaaaagctgattctgctgacggccgatcgtccccctgagcttatcgactgcggcgccaatcaggccatccgtcagccggggctcttttcttcgcatccttcgcagacgatttcgctgccgcgtcccacccaggatattccggcgagctggctggtctccaccgtcgatcacgccatggagacgctgcgcggcggggcgctgcatatcaactgcccgtttgccgagccgctgtacggcgagctggacgacacgggtcttgactggcagcagtctctcggtgactggtgggggagtgagaaaccgtggctgcgcgagcagacgcaccttgagagcgcgaagcagcgcgactggttcttctggcggcagaagcgcggcgtggttatcgccgggcgcatgagcgctgccgaaggcaagctggtcgccgaatgggcgcaaaccctgggctggccgctgatcggcgacgtgctttcccagaccgggcagccgctgccgtgcgcggatctctggctgggtaatgccaaagcggtcaccgagctgtcgcaggcgcaaattgtggtccagcttggatcgagtttaaccggcaaacgattactgcagtggcaggccacctgcacgccggacgaatactggctggtggacgcgctggaagggcgtcttgatccggcgcaccaccgcggtcgtcgtctggtcagccgtatcgacgcctggctggcgctccatccggctgaaaaacgcaaaccctgggcggttaccctcccggacctgtcgcggcaggcgtgggaactgacccatgcgcgctgtgaagcgttcagcgaggccgggctggcgcaccgtattcgccagtacctgcccgagcaggggcagctgtttgtcggcaacagcctggtcgtgcggctgattgacgccttttcgcagctgcccgcgggctacccggtgtacagcaaccgtggtgccagcggcatcgacgggctgatctctacggcggcgggcgtgcagcgcgccagcgcaaaatcgacgctggccatcgtgggggatctctccgcgctctacgacctcaacgcgctggcgctgctgcgtcaggcgtctgccccgttcgtgctgatcgtggttaacaacaacggcgggcagattttctccctgctgcccacgccgcagagcgagcgcgagcgcttctatctgatgccgcagaacgtgcacttcgaacacgccgcggcaatgttcagcctgaaataccatcgcccggaaagctgggaacagctggatgcggcgctaagctccgcctggaagcagcccggcgcgacgctgattgagctggtggtgaacgaggctgacggtgcgcagaccctgcaaagcctgctggcgcaggtgagccagctgtgatcctctcgggcgtgcagcaggctggaaaaccaggctacccctggctggtctttttgcacggtttttccggcgattgccgcgagtggcagggtgttggtgagcggctttgcgattaccccaggctgtatctggatctgccgggacacggcggatcccggaatctgggcgtgacgggcttcgacgagatgagcgcgttgcttacccgaactctgattagttacaacatactgaaattctggctcgtcgggtactccctcggcggccgcattgcgatgttccatgcctgccagcagccgaaggggctgttgggcgtgacggtagaaggcggtcatccgggcctgcaggatgccgatgcgcgacaggcgcggctggcatcagaccgccgctgggcgacgcgttttcgcagcgaaccgttggaaaaggtattcgctgactggtaccaacagcccgtgtttgcctctctgacggacgcacagcgcgacgcgctgattaccctgcgcagccagaacaacggcgcggcgctggcgatgatgctcgaggcgacgtcgctggccgtgcagcccgacctgcgtaccgcgctcagcgcacgtgatttcacttttgattatctctatggcgaacgtgatgagaagtttacggcccttgctgcggagctgaacgccgtttgccatgcaattcccaacgccggacacaacgcccaccgggaaaaccccgacgcggttgccgcgagtctggctcagatactgcgtcttcgcataaaggacactctatgatctatcctgatgaacacatgctttacgccccggttgaatggcaggactgctccgaaggctacaccgatattcgttaccacaaatccaccgacggtattgccaaaatcaccatcaaccgcccgcaggtgcgtaacgccttccgtccgctgaccgtgaaagagatgattcaggccctggcggatgcgcgctatgacgacaacatcggcgtgattgtcctgaccggcgaaggcgagaaagcgttctgctccggtggcgatcagaaagtgcgcggcgactacggcggataccaggacgatgcggggacgcaccacctgaacgtcctcgatttccagcgtcagatccgcacctgtccaaaaccggtggtggcgatggtggcgggctactccatcggcggcggccacgtgctgcacatgatgtgcgacctgaccattgccgctgaaaacgccatcttcggccagaccggcccgaaagtgggatctttcgacggcggctggggtgcctcctacatggcgcgcatcgtcgggcagaaaaaagcccgtgaaatctggttcctgtgccgtcagtacaacgcgcaggaagcgctggatatgggcctggtgaataccgtggtgccgcttgccgatctcgaaaaagagaccgtgcgctggtgtcgcgaaatgctgcaaaacagcccgatggcgctgcgctgtctgaaagcggcactcaacgccgactgcgacggtcaggcgggtctgcaggagctggcgggtaacgccaccatgctgttctacatgaccgaagagggtcaggaagggcgcaacgcgtttaacgaaaaacgccagccagacttcagcaaatacaaacggaatccgtaatgcgtcgcgcgcaggtttaccgctggcagataccgatggacgcgggcgtggtgctgcgtgaacggcggttaaaaacccgtgacggcttcttcgtgcatctgcagcagggcgagcgggaaggctggggcgagatttcgcctctgccgggctttagcctcgagtcgctggaggatgcgcaggctgcattgctggcgtgggcggacgcatggcgtgagggcgagaacccggcgttaccggatgtgccttccgcggcttttggtatcagctgcgcgctggcggagctggacggcagcctgccagaagcggggaattaccgcgcggcaccgctctgcacgggcgatccggacgagctgttcgcgcagctctccgccatgccgggcgagaaggtcgcgaaaatcaaagtcgggctttatgaagcggtgcgtgacggcatggtcgccaacctgctgctggaggcgatccccgatctgcatctgcgtctggacgccaaccgcgcctggacgccgcttaaggcgcagcagtttgcaaagtacgtcaatccggcgtaccgcagccgcattgccttcctcgaagagccgtgcaaaacccgcgaggattcgcgcgcgtttgcccgcgaaacggggattgccatcgcctgggatgaaagcctgcgcgaggccgattttgaattcgctgccgagcccggcgtcagcgcggtggtgattaaaccgacgctgaccggcagcctggcgaaagtgcgcgagcaggtcgcggcggcgcacgccttagggctgacggcggtcatcagctcgtcgattgagtccagccttgggctaacccagctggcgcgcattgccgcctggttaacgcctgacacggtccccggcctcgacacgctgaacctgatgcaggctcagcttcttcgcccgtggccggacagcgcgctgccgtgcctcgacgtcgcggcgctggagccgttgcgatgagttttaccgactggccgtggcggcactggcgtgcgcaatttgccgataaaccggcgctgaggctgaacgacgaggtgctcagctggcaacagctgtgcgcgcgtatcgacagccttgcggcgggctttcaccgtcagggcgtggaggagggcgacggcgtgctgctgctggcccataaccacccgcacaccctgctggcgtggctggcgctgctccagtgcggggcgcgtattcttcccgttaatccgcagctgccgcgcccgctgctggacgtgctgctcccgcagatgacgttgcgctttgcgctggtgctggacggcagctacgacggccttcctgccctgagcatgcgcgagaccgccgatgcgtattgcgctgcgtggcaaccggcgcggctggcctccatgacgctgacctcaggctccaccggactgccgaaagcggcggtccatacctgcgaggcccatcttgccagcgcgcgcggcgttttgtcgctgatgccctacggtgaagatgacgactggctgctttcgctgccgctgtttcacgtttccggccaggggattttatggcgctggctgcaggccggcgcgcggttaaccgtgcgcgagaaacagcctctggagcaggcgctgtgcggctgcacccacgcctcgctggtgccaacccagctctggcgtctgcttaatgcccaccagcctgtcgcactgaaagcggtgctgctgggcggggcggccatccctgtggaattgaccgaacaggcgcgagagcaggatatacgcaccttctgcggctacggtctgaccgagtttgcctctaccgtctgtgcgaaagaggccgacggcgagccggacgtgggccgtgcgctgccgggcagagaggtgcaggtcgttaacggtgaagtctggatcagagcgcaaagcatggcctcaggctactggcgggatggcgaactgattccgctgaccaacgcgcagggatggttcgccacccgcgatcgcggcgaatggcatgacggccgtctgacgatcctcggccgcatggacaacctcttttttagcggcggagaagggatccagccggaatcgctggagcgcgttatcgccactcacccgcaggttaaccaggcgtttatcgtcccgctggacgacgctgagttcgggcaacgtccggtggcggtggtggagtgcgagccgggaacggatatcaccactttacccgactgggtcagggacaaggtggcgcgttttgagcaacccgtccgctggctgctgctgccgaccgaactcaaaaatggcggcattaaagtctcgcgccgcgcgctgcaggagtgggtgaacgcaacgctgaagggataatagccgtttcaaatagttacaatctactggcctgccgcacgcagagtgcttgatccccggaagacccaggttaaaatctcgcggttttgggacttctctataaaaattgtgcgggatcacgacaatgaaaaaagtggcattactgggcctcggcctgatggttgtatctgcggcggctaacgccattagcattaacggctcggcgggtcaggattatacccacctgggcttcggcatgggtaccgagacatccggtctggcgatgaccggcggctggacgcataacgatgacgacggcgacgctgccagcctcggcctgggcctcaacattcctctgggtccgttcctggcgaccgtcggcggtaaaggtatctataccaacccaaatgacggtgacgaaggatatgcggcggcagtgggcggcggcctgcagtggaaaatcggcgacagcttcggcctgtttggcgagtactactactctccagattccctctcaagcggtatcgacagctatgaggaagccaacgccggcgcgcgctggaccatcatgcgtccaatcaccatcgaagcaggctatcgctatctgaacctggccggtaaagacggcaaccgcgacaacgcgctggccgacggtccgtacgtgggcgtcagcgcaggcttctaatctctccggcgcggcatgctgtcgcgccagtttctcctcttctccaccccgcgtttgcgctatagtgttttgaccaaataagcgggagaacacaatgattaacgtggagatgttatccaccggcgacgaagtgctgcatggacaaattattgataccaatgctgcctggcttgccgatcttttctttgagcaaggattaccgttaacgcgccgcaatacggtgggcgacaatcttgagtcactggtcgctgttctgcgcgagcgcagtgaacagtgcgacgtgctgattgtgaacggcgggctcggccccaccagtgacgatctcagtgccctggccgccgcgaccgcaaaaggcgaagggctggtgctgcatgaggcgtggctctcgcagatggcgcgttttttctccgaacgtggccgcgtcatggcccccagcaaccgcaaacaggctgaaattcccgccagtgctgaactggtcgataacccggtcggtaccgcgtgcgggtttgccatgcagctgaaccgctgcctgatgttcttcacgccgggcgtgccctcagaatttaaaatgatggtcgagcagcagatcctgccgcgccttcgccagcgttttaccctgccggaacccccgctgtgcctgcgtctgaccacttttggccgttcggaaagcgatctggcccagagcctcgatcacctctcactcccgccgggcgtctccatgggctatcgctcctccatgccgatcattgagcttaagctgaccggaccggccacccagaaagaggcgatgctcgcgctgtggcctgaggtgcagcgcgtagcgggtgaaagcctgatctttgaaggcacggaagggctaccggcgcagattgcgaagcatctgcagtcgcgtcagctgagcgtgaccttaagcgaacagttcaccggtggcctgctggcgctgcagctgtcgcgcgtcaacgcgccgctgctggccagcgaagtggtgccgttccagcaggagactctggcgcagaccgcccgctggtcgtccgagagaagggtgaagcattttgccggtctggcgctgtttgtcggcgggctggatgaggaatacctcaacttcgcgctggcgacgcctgagggcacccacgccctgcgggtaaaaatgagcattacccgccacagcctggcggtgcgtcaggaggtgtgcgccatgatggcgctgaacatgctgcgccgctggctgaatggcaaagaggtggccagcgagcacggctggattaacgtggttgaatcgctgttcgtggagtaacgactgtgccggggcctttcgccccggccatgttcacccgatcgcctttgccagcagcgtaatcggatgctcgcagcgcttgctggtggacatctcaatctgccacttgcaggtttcgcagtcggtcaccacgatatccgcgccgctctcctcaatctgacggaacagcggagcgccgatcgcctgcgacgtttcgtagttttcacgcttaaagccgtaggttcccgcaatcccgcagcagcgagagtccagcaccgtcagctccagccccggaattaaccgcagcagctccagcgtatagagcgaccagcccattttttccatatgacacggcgtgtggtaaaccactttcagcggcaatttccccaggggcaacgtctgtccgctgtccagcttgcgccacaggaagcgcgtcgccagctcgatgtgctcgcgcaggccggtgttgtccacgtccagaagatgcggatactcgtcgcgcagggtgaaggtacaggtggatgaggtcgccaacaccggtatgcctttctcgacaatcgcctcgcgcagggaggtgacattgctttgagcctgcctgcgtgctttatcggtaaacccgttggcaatcagcggcacgccgcagcacttttctttattcagtagctgaacgcccgttcccatggcgttcagcaccttcagcagatctttacccaactgcgggtggttgtaattcacgtagcagccgtggaaaaaagccacctggtcggcatacttcgcctgctccgcggcgacggacttataccagcggcggaaggtgccgtgagaatattttggcaggctgcggtgatggtcaatcttcagcgtggcatccagcagctggcgcaccggcttgagagcggtcgcggcattcaccagcggggcaaacggcgtcgagacgctgcccatcagatcggtgtggctcagaatcgcgtcccgcagcgacggcttttgcgtgctgtagcgcgcccgggcgcgctgaataatatcgccgattttcacatccgacgggcaggcgacttcgcagcgtttgcagttgatgcagtatttcagcgcttcatcgtacagcttgccgtccttcaggcgcaggcgctcgccgtccggcccggcctgtttaggcccgggatagcgtgggttcacgccgctgaccgggcagacggtggtacacaccgtgcatttgatgcagctttcaaaacgggtgtcgttcattgttcagcctccgtgcgctggctaatctgctctgccacatacagcgccgtgacggcgcagacgccgccaccgcatccctgggcgatgggatcgtatccgcccagcagcgaaccgatggcaaaaagagtactgacgggcttaccggaaagctgaggatgcaggtggttatcgacaatcacgccgaactgctgccagggctgcggcgagaagaaatcactctgataccagtccgcgcgagaggctcgctggcgaacatccagccccataatggcttcccgaatgccttcccggctgctcagcagcccgttgctgaagaaactgccgcttgccagcaccgtatagcgggcgcgaagcggaatatcctcgtggtttcgcgtccagatttcgcttaccgcgccgtctgtcagggtgatttttttcacttcatcaccggccatccagacgccaccctgcgcaacaaacttacgctggagctgggtatgcaggcgaatgccggggacagacgggggcagcgtgggcaacaaaccgagcgtgcagggcagacagtctgagagccagcgccagagtcggttatcgttcaggccaaagcacgcgggcatcaatagcgcatcgcatccttccgcaagcgggctgagcgcctcatacagcagcggccatttgtcctcgttatccagaaaacgggcgatattcaccgcgcgaaattcgctcgggttatcgcgcaggacatcaagctcaggcagctctatctctgccgtttcggcgttaacgccctggcgacaaagtgacgccgccgcgagatggggctgaaaatccagaaagccgctaatccctaccacccgcacgcgtcccgcgtgaatgggggcaacgggcacttcctccgggctgagccaggcggaacgcagggtgcctagcggcgtaacgcgctggtgattgaacctggcgctgccctgcagacgcgcgccgcactccgccagcagcgcttcggtttccagcgcaaagcggtcaatatgctgtgcaccaaccaggtgatacgggtgctccggcggcagcttatcgcggtacgcttcgtccaccagatccagcgagcccgacgagaagtgcagggcgctctgcccccgggtgataatggcgcagcgcagcccctgcttcgtgagcttaatgccgcagagcaggcccgccagcccgccgccgacaatcacggtatcaaatttcatcgtgttgctccttctcaagaccgcaaagcccctggtagacccagcgggtaaattcactttcacgcagggcatcgccccaggcgacaggctgaatgcctttccagcgctcgtttaaaaacgcgctgagctgatcgagcgactgggtggcggtggtggtatgaaaacgctgcaacagccccgcagctcggcaggcgcacagttcgccctgacaggtccccattccgacgcgggtgcggcggcggagatcgagcaggctgttgaccgtcaggttctccaccgcgtactgcacctcaccggccgtcacggcttcgcactcgcacaccaggctgcggctcaatcttccttcaccaagccacggtggcgttctgtcgccgtggcggtataccgcggacccgcgcagcggcgcgggcagggagatgattttctgcagcgttttttcggtggactgacgcgatcccggcagcggctgttctgccgtgacgcacggctcggtatttccgagcttgcggcagacggcatcggtcgcccactcggccatcaggcgataggtcatcagcttgccgccggtgatggtgataaacccgtccatgccgtcgcgcgcggcgtgatcgagcagcacgatgccccggctgacgttccgtccgctcgggtcgttgtcgttggcgaccagcggacgcacgcccgcgtaggcgcgcagaatccgcgtctgggccatcaccggggccagtttttccccttcccgcagcaggatatctacctcttcagcggtgacgcggttgtaatcaatctcgctgtagtccacgtgcgttgaagtcgtcccgattaacgaaatggtgtcgcccggaacgaggatatcggcgtcagacggcttgcggcagcggttaatcacgtggttattgatgcggtggtcgaggatcagcagcgagcctttcgccgggaacatgcgcaccgacaggtccgcatattccgctatacgctggccccagatccccgccgcgttaaccactacggcggcatacagctcgccgtgctcgttgtactgcgtatcaaacacccgcaccccacagatgcgatgaccttcgcgaataagcccggtcacttcatgtccggtcagaatgcgtgcgccatgctcacgggcgtccagcatgttggcggcggtcaggcggaacggatcgacggtaccgtcagggactttcaccgcgccgataagcgccgggttgaccgacggttccagccgccgcgccagcgccggatccatggcctccgcctgaatgcccgcggcagtgcaggcggtaataaaggtgtcctgaaaggcgaggtcatcttcgggaagggtaataaagaggccgtcggtcggctcaatgcagtggcgtgcgatacgcttgaggatctggttttcagcaatacattcgcgcgcggattccgcgtcggtgaccgcataccgggcgccgctgtgcagcaggccgtggttccgtccggttgcgcccgtggcgatatcatggcgttccagaagcgtaacgcttaagccgcgaagggcgcaatcgcgcgcgatcccggcgccggttgcgccaccaccaatgattatcacatcactataacgaggatcgtgactggtcattgtttaccctctatgttcgttttttatcatttagccatagtaattttgtggtttgtttgatttcgaacataaacgcgcggaattcgaaagtgaaacgtgatttcatgcgcttttttgcgcattctgtcatatttctgtaacaatctgtgcgttgattcacagtaacaatcaccgtgatttcttaacatccccgcctctggaattcaggtgcgagccacctgctcattcatttcaaggccacggaggctgttatgctcagtatcttcaaacctgcgccccacagggcgcgtctgccagaggcagaaatagatccgctctatcgccgtctgcgttggcaaatcttcctggggatcttcttcgggtatgcggcgtactaccttgtacgtaaaaacttcgcgctcgccatgccgtatctggtagagcagggcttctcccgcggcgatctggggttcgcgctgtcggggatatccatcgcctacggtttttccaaattcatcatgggttccgtgtcggatcgctcgaatccgcgcgtgttcctgcctgccggtctgatcctggcggcagcggtgatgctgtttatgggctttgtgccatgggcaacctccagcattgccatcatgttcgtgctgctgttcctctgcggctggttccagggaatggggtggccgccgtgcgggcgcaccatggtgcactggtggtcgcagaaagagcgcggcggcatcgtgtcggtgtggaactgcgcccataacgtgggcggcggtattccgccgctgctgttcctgctggggatggcctggttcaacgactggcacgcggcgctctacatgcctgcctttggcgctattctggtggcgattattgccttcgccctgatgcgcgatacgccgcagtcctgcggcctgccgccgattgaagagtacaaaaacgactatccggatgattacagcgagaagcacgaagaagagctgaccgcgaagcaaatcttcatgaagtacgtcctgccgaacaagctgctgtggtacatcgcggtcgccaacgtgttcgtttatctcctgcgctacggcattctggattggtctccgacctacctgaaagaggtgaagcacttcgcgctggataaatcctcctgggcgtacttcctgtatgaatacgccggtatcccgggcaccctgatttgcggctggatgtcggacaaggtgtttaagggtaaccgcggtgcgacgggcgtcttctttatgaccctggtgactatcgcaacggtagtgtactggctcaacccgccgggaaatccgggtgtggatatggcctgtatgatcgtcatcggcttcctgatttacggtccggtgatgctgatcggtctgcacgccctggagctggcgccgaagaaagcggcgggaacggcggcgggctttaccggcctgttcggctacctcggcggttcggtcgcggcgagcgccatcgtgggctataccgttgacttcttcggctgggacggcggctttatggtgatgatcggcggaagcgtgctggcggtactgctgctggttgttgtgatgatcggtgaaaaacgtcaccacgcggaagtgctggcgcgtcgtcaataaggagctttgcgatgaaattaactcagttagcaaccggcctgctgctggcgggcctgatgacaggctccgcgctggcggcggataaaatcgttattgcccaccgcggtgcgagcggctatctgccagagcatacgctgccggcaaaagcgatggcctatgcgcagggggcggattacctggagcaggatctggtgatgacgaaggacgaccagctggtcgtcctgcacgaccattatcttgaccgcgtgacggacgtagcagagcgtttcccggatcgcgcccgcaaagatggccgcttctacgccattgacttcacgctggcggagatccgctccctgaagttcaccgaaggcttcgagattgaaaacggcaagaaggtgcaggtctatccgggacgtttcccgatgggcaaatctgacttccggatccataccttccaggaagagattgagtttgttcagggactgaaccactccaccggtaaaaacatcggcatctacccggaaatcaaagccccatggttccaccatcaggaagggaaagacattgccgcgaagacgctggaggtgctcaaacagtacggctacaccagcaagcaggacaaagtctacctgcagtgttttgacgccgccgagctgaagcgcatcaaaaccgagctggagccgaagatgggcatgaacctcaatctggtgcagctgatcgcctataccgactggaatgaaacccaggagaagcagccggacggcaagtgggtgaactacagctacgactggatgtttaagccgggcgcgatgaagcagattgcgcagtacgccgacggcatcgggccggattaccacatgctggtggcggaaggctcaacgccgggccacgtgaagctgacggcgatggtgaaagaggcgcatgccagcaagatgcaggtgcatccgtacaccgtgcgtgcagaccagctgccgccgtatgccacggatgtgaatcagctttatgaggtgttgtataaccaggcgggcgtggacggactgtttacggatttcccggataaagcggtcagcttcctgaaggattaacgctgaaattgccgggtggcggctgcgccttacccggcctacgaactgcggttttgtaggtcgggtaagcgaagcgccacccgacacccgacaccatcacatctcgatctcgatatcgccttttgcccggcagcagcagggcaaaatttccccttcgttgataaaggccagtggttcggtcagccagtccacctggccggcgaccagacggcagcggcaagaaccgcagtagccggaacgacactggtactctacttcgacctgatgcgcctcaagcgccaccagcagagaagggtgctcttcccgacacagtacctcagtgccggaaagacttaacgtgacgcgtgacatcagagctggaagtcgctcaggtcgtcggtgttgacttcagaatcaatctgaccgaccagataagaactcacttccacttcctgcggcgcaacctgcacgttatcggacaccagccaggtgttgatccacgggatagggttagagcgcgtctggaacggcaggtcgagaccgaccgcctgcatgcggatgttggtgatgtactcaacgtactggcacaggatgtctttgttcaggccaatcatggagccgtcgcggaacaggtagtctgcccactctttctcctgctgagccgccagcacgaacaggtcatagcactcctgcttgcactcttcggcgatttccgccatctccggatcgtccgtgccgctgcgcagcaggttcagcatgtgctgggtaccggtcaggtgcagggcctcatcgcgggcaatcagacggatgattttggcgttgccttccatcagcttgcgctcggcaaaggcgaaggagcaggcgaagctgacatagaagcggatcgcttccagcgcgttaacgctcatcaggcacaggtacagctgttttttcagcgcgcgcaggttcacggtgatggttttaccgttcacatggtgagtgccttcgcccagcaggtgccagtagctggtcatctcgatcagctcatcatagtaatgggcaatgccttccgcgcgcttctggatctgctcgttggtgacgatatcgtcaaacaccaccgccggatcgttcacgatgttgcggatgatgtgggtgtaagagcgggagtggatcgtctcggagaacgcccaggtttccacccaggtttccagctcaggaatcgagatcagcggcagcagcgccacgtttgggctacggccctgaatggagtccagcagcgtctggtacttcaggttgctgatgaagatatgtttttcgtgatccggcagagactggtagtcaatacggtcgcgggagacgtccacttcttccggacgccagaagaaggagagttgcttttcaatcagcttttcgaagatgtcatatttttgctgatcgtagcgtgccacgttgaccggctggccgaagaacatcggctctttgagctggtcgtttttcgtctgtgaaaaggtggtatatgccatgagtgtgtcctaaaaacgtaggccgggtaagcgtagcgccacccggcatttacattagatcttacatgcgccgctttcgcagccatcgtcctgaattgacggaaccaggtcatcctgcgcgtcttccgcaccgtcacgggtgttgtgatagtacagcgttttcacgccaaacttgtaggcggtgagcaggtctttcagcaattgctgcatcggcaccttgccggacgggaagcgcgtcgggtcatagttggtattggcagagatcgactggtcgataaacttctgcatgatacccaccagctgcaggtagccgtcgttgtttggcatttcccacagcagctcgtagttgtcacccagcgtctcgtaatccggtaccacctgacgcagcacgccgtctttcgaggctttgatgctgacgtggccgcgcggcggctcaataccgttggtggcgttagagatctgcgaagaggtctcggacggcatcagggcagagagcgtggagttacgcaggccgtgagtcttgatggactcgcgcaggccttcccagtcgaggtgcagcggctcgctgacgatcgcatccaggtctttcttgtaagtgtcgattggcagaatgcctttcgcgtaggtggtttcgttgaaccacgggcacgcgccttgctctttcgccagctcgttggacgctttcatcaggtagtactgaatcgcttcgaacgtctggtgcgtcaggttgttggcgctgccgtcggagtaacgcttgccgtttttcgccagccagtaggcgaagttgatcacgccgatacccagggtacgacgtcccatcgcaccgcgtttcgcggccgggattgggtaatcctggtagtccagcagggcgtcgagcgcacgaaccgccagcacggccagctcttccagctcgtccaggctcttgatggcacccaggttgaacgcggacagcgtacacagcgcaatttcaccgttttcgtcgttcacgtcttccagcggtttggtcggcagggcgatctccaggcacaggttagactggcgcactggtgcaaccaccggatcaaacgggctgtgggtgttgcagtggtcaacgttctgtatgtagatgcggccggtagaggcacgttcctgcatcatcagggagaacaggtccaccgccttcacgcgctgcttgcggatgctgtcgtctttttcgtatttggtgtacagacgctcgaattcgtcctgatcggcgaagaacgcgtcatacaggcccgggacgtcggacgggctgaacagggtgatctcttcgcccttcagcagacgggtgtacatcagcttgttgatctgcacgccgtagtccatgtgacgcacgcggttgccttcaacaccacggttgtttttcaggaccagcaggctttccacttccaggtgccacatagggtagaacagggtcgcagcaccgccgcgtacgccgccctgagagcaggattttactgccgtctggaagtgcttatagaacgggatacagccggtgtggaacgcttcaccgccgcgaatcgggctgcccagcgcacggatgcgaccggcgttaatgccgataccggcacgctgggaaacgtatttcacgatggcgctggaggtggcgttgatggaatccaggctgtcaccacactcgatcagtacgcaggagctgaactgacgggttggggtgcgcacgccagacatgattggcgtcggcagtgaaatcttgaacgtcgataccgcatcgtagaaacgcttcacgtaatccagacgggtgtcacgcggatagttagagaacaggcaggcggccaccagaatatagaggaactgggcgctttcgtagatctcaccggttacacggttctgaaccaggtatttgccttcgagctgcttcaccgccgcgtaggagaagttcatgtcgcgccagtgatcgataaacccgttcatctgctcgaactcttcttccgtatagtcttccagcagatgcgtgtcgtatttgcccagctcaaccattttcaccacgtgatcgtaaagcttcggcggctcaaactggccgtaggcttttttacgcaggtggaaaatcgccagacgtgcagcgaggtactgataatccggtgcttcgcgggagatgaggtccgccgccgctttaatgatcgtttcgtggatatcagacgttttgatgccgtcgtagaactggatgtgtgaacgcagttcaacctgggagatagatacgttgttcagtccttctgctgcccagtcgagaactcgatggattttgtccagattgatacgctcggtagtaccgtcgcgctttgtcaccagcagactctgattcatgtggggtttacctgtccgtgaaataaaaaaatatcccccgcttatccacagaaccgtcttgtgactaactctgtggataaatactacatatagggggtttgcgataagaaaaacgctatatggtgagtattctagtaaggattcttttcagtacaagggttgattttgacgttaaattgaggttgtgaaagggtaaaaaaggctaagtcctcgtgctgtaaggcctggaagacatgtcaataattaagaaaaaaaattcaaaatttgatcgagtgctgatttcttcaacgggcggtcagaattgcgcaacatgatgtcgcgcaatctttataagaataacgaatgacgttagtcgtttttggcggttgtatgcaacatatagttaacatcaacgcccggtgcgagtttgaatttattggtcagcggattgtagtgcagaccggtgatgtgctgctccttgagccacgtctggtcgacccagcctaacagttcggcaggcttgatgaatttcttcacgtcatgcgtgcctttcggcaccatgcgcagcacatactccgcgccaacgacggccatcagccaggctttaccgttgcggttgatggtcgagaagaagacctgtccacccggtttcaccagttttgcacaggcgtgcaccacggactgcggatcgggaacgtgctccagcatctccatgcaggtcaccacatcgtactgatgggcatgttttgccgcgtgttcttccacggtttcctgcacgtagtccacctgtatgccagactccagcgcatgaagacgagcaacctgcagcggttcaaagcccatatccaggcccgtgacgttcgccccttcgcgcgccatgctttccgccaggataccgccaccgcagccgacatcgagcacttttttaccgaacagaccgccggaacgctccgcgatatagcccagacgcagcgggttaatacggtgcagcggtttgaactcgccttcgagatcccaccagcgggacgccaccgcttcaaatttggcaatctcttcgtggtcaacgttgtgagccaccggggatttttcggcattcatgggcgcttttactccttatttagcaagacgaatgagtatatcaggcaatccctgtgaataaagcgtataggtttacctcaatcacctcggctgtgttataatttgcgacctttgaatccgggatacagtagagggatagcggttagatgagcgaccttgcgagagaaattacaccggttaacatcgaggaagagctgaagagctcctatctggactatgcgatgtcggtcattgttggccgtgcgctgccggacgtccgcgatggccttaagccggtacaccgtcgcgtactatacgccatgaacgtattgggcaatgactggaataaagcctataaaaaatctgcccgcgtcgtcggtgacgtcatcggtaaatatcacccgcatggtgataccgccgtttatgacaccatcgttcgtatggcgcagccattctccttgcgctacatgctggtagatggtcagggtaactttggttcagtcgacggcgactccgctgcggcgatgcgttatacggaaatccgtatgtcgaaaatcgctcatgagctgatggccgacctggaaaaagagaccgttgatttcgtcgataactacgacggcaccgagcgcatcccagatgtgatgcccaccaagatcccgaacctgttagtgaacggttcgtccggtatcgcggtcggtatggcaaccaacattccgccgcacaatatcaccgaggtgatcaacggctgtctggcttatatcgacgatgaagatatcagcattgaagggctgatggcacacatcccgggcccggacttcccgacagcggcgatcatcaacggtcgtcgcggcattgaagaagcgtaccgtaccggccgcggcaagatttacatccgtgcccgcgctgaagtagaagcggacgccaaaaccggccgtgaaaccattattgttcacgagatcccgtatcaggtgaacaaagcgcgtctgattgaaaaaatcgccgagctggtaaaagaaaaacgcgttgaaggcatcagcgcgctgcgtgacgagtctgataaagacggtatgcgcatcgtgattgagatcaaacgcgacgcggtgggtgaggttgtcctgaataacctgtactcccagacgcagcttcaggtctccttcggtatcaacatggttgcgctgcaccatggtcagccgaagatcatgaacctgaaagagatcctgagcgcgttcgtccgtcaccgccgtgaagtggtaacccgtcgtaccatcttcgaactgcgcaaagcgcgcgaccgtgcgcacatccttgaagcgctggcggttgcgctggccaacatcgacccgatcatcgagctgatccgtcgtgcgccaaccccggcggaagcgaaaaccgcgctggtttcccgtccgtgggatctgggcaacgtcgccgcgatgctggaacgtgcgggcgatgacgcggcgcgtcctgaatggctggaacctgagttcggcgtgcgtgacggtcaatactacctgactgaacagcaggcccaggcgattctggatctgcgtctgcagaaactgaccggccttgagcatgaaaaactgctcgacgaatacaaagagctgctggaacagattgctgagctgctgcatatcctgggcagcgcagagcgcctgatggaagtgattcgcgaagagctggagctggtccgcgatcagttcggcgacgagcgccgcaccgaaatcaccgctaacagcgcggacatcaacatcgaagacctgatcaaccaggaagacgttgtggtgaccctgtctcaccagggctacgtgaagtatcagccgttaacggactacgaagcacagcgtcgtggcggtaaaggtaaatctgcagcacgtattaaagaagaagactttattgaccgcctgctggtggcgaacacccatgacacgatcctctgcttctccagccgcggtcgtctgtactggatgaaagtctatcagctgccggaagcaagccgtggcgcacgtggtcgtccaatcgttaacctgctgccgctggaagcgaacgaacgcatcaccgccattctgccggtacgcgagtacgaagagggcgtgaacgtctttatggcgaccgccagcggtaccgtgaagaaaaccgcgctgaccgaattcagccgtccgcgttctgccggtattatcgccgtgaacctgaacgaaggcgacgagctgattggcgtggatctgacctcgggctctgatgaagtcatgctcttctctgcggccggtaaagtggtgcgcttcaaagaagacgccgtccgtgcaatgggccgtaccgcgacgggcgttcgtggtatcaaactggctggcgaagacagcgttgtttctctgattattccgcgcggtgaaggggctatcctgaccgtcacgcagaatggttacggtaaacgtacggcggaaggggaatacccaaccaagtctcgcggcacgcagggcgttatctccatcaaggtgaccgagcgcaacggttccgttgtcggcgcggtgcaggtagacgatgccgaccagatcatgatgatcaccgatgccggtacgctggtgcgtacccgcgtatctgagatcagcgtggtgggtcgtaacactcagggcgtgatcctcatccgtacagcggaagatgaaaacgtggtgggtctgcagcgcgttgccgagccggtggatgacgaagagctcgactccatcgacggtagcgtcgcggaaggcgatgaggacatcgcgccagaagccgacaccgacgatgacgtagcggatgacgctgacgagtaatgtctcctgatgcaaaaaagggccggattccggcccttttcttttgcagaagcagataagtcaacgttgcgacctggcgcgtttaccgctaccttaaccacattcttttgaccccgacggcggagcctcgcccccttgaaatacctcgtctcctttcgtactacgctgaaagtctctcgctatctgtttagagcgctggcgctcctgctttggctgctggtggccttgttctcggtgttttacatcgttaatgcgctgcatcagaaagaagcggagatccgccaggagtttaacttaagctccgaccaggcccagcgctacattcagcgaacgtctgacgtcatgaaggagctgaagtatattgccgagaatcgtctgacggcggaaaacggtattcttgcgctccgcgggcgtaacgacaaaaccgaagttccggacttccagccgctgttcccggattccgattgctccaccatgagcaatacctggcgcgggtcgctggaatcgctagcctggtttatgcgctactggcgcgacaacttctccgccgcctatgacctgaaccgcgtcttcctgattggcagcgaaaatctctgcatggctgactttggcctgcgcgacgtgcccgttgaacgtgacaatgcgttgaaaagcctgcatgaacgtattgtgaaataccgcaatgcaccacaggacgagcgcgggaataacatcttctgggtgagccagggcccgcgccccggtgtgggctatttctatgccctgacgccggtttatctcggtaatcgcctgcaggcgctgatggggattgagcagaccatccgcatggaaaacttcttcacccctggcagcctgcccatgggggtgaccattctggatgaaaacggccatcagctgatctcgcttgccggacccgataaccggctgaacgtcgaaccgcactggatgcaggagcggtcgtggtttggctatacctcgggcttccgcgagttggtgctgaagaagagcctgccgccgtcgtcgctgagtatcgtctattcgctgccggtggatatggtacttgagcggatacgcattcttatcatgaatgcgattctgctcaacctgctggcggggggcgcgctgtttacgctggcgcgcatgtatgagcggaaaatctttattcccgccgaaagcgacgcccagcgcctggaggaacacgagcagtttaaccgcaagattgttgcctcggcgccggtggggatctgtatcctgcgtacccaggacgggaccaacatcctgagtaacgaactggcgcataactacctgaacatgctgacgcacgaagaccggcagaggctgacgcagattatctgcggtcagcaggttaacttcgttgacgtgctcaccagtacgcacaccaacctgcagattagctttgtccattcccgctatcgcaatgaaaacgtggcgatttgcgtgctggtggatgtctccgcgcgcgtgaagatggaagagtcgttgcaggagatggcgcaggcggcggagcaggccagccagtcaaaatccatgttccttgcgaccgtcagccacgagctgcgtacgccgctgtacgggattatcggtaacctcgatctgttgcagacgaaggaattgccgaaaggcgtcgaccggctggtgacggcgatgaataactcctccagcctgctgctgaaaatcatcagcgatattctcgacttctctaaaattgagtccgagcagctgaaaatcgagccgcgcgagttttcaccgcgcgaggtgatgaaccacattagcgccaactatctgccgctggtggtgcgtaaacagctggggctctactgctttattgaaccggacgtgccgctgacgctgcacggcgatccgatgcgcttgcagcaggtcatctctaacctgctcagcaacgccatcaaatttaccgataccggctgtattgtgttgcacgtctgccgggcaggagattacctgagcattcgcgtgcgcgacacgggggtcggcattccggcgaaggaggtggttcgcctgttcgatccgttcttccaggtcggtaccggcgtgcagcgtaacttccagggcaccggactggggctggcgatttgtgagaagctcgtcagcatgatggacggcgatatctccgtggataccgagcccggcatgggcagccagttcaccatccgcattccgctttattcggcgcaatatccggcaaaagccacggtagacgggctgagcgataagcgctgctggctggcggtgcataacgcctcgctgaatgactatctgacggcgctgctgacccactgcggcgtgagggtgtgccgctatgaaggtcaaacaccggatgttgacgatgtgctgatcgccgacgagatgcaagagcagcagtggcaggggagagggtcggtgctcttctgccgtcgccacatcggcattcccgtcgagcgcgcgcctggggaatgggtacacagtgttgcgacgccgcacgagctgttgagcttgctggcacgcatctacaaagtggagctggaagagcgcgatggcgcgggcggattgccgtcaccggagtctctggcgtcggtgaatgacgatatgatgattctggtggtggatgaccatccgattaaccgccgcctgctggctgaccagcttggatcgctgggctaccagtgcaaaaccgccaatgacggcgtggatgcgctgaacgtgctgagtaagaatcatattgatatcgtgctgagcgacgtcaacatgcctaacatggacggctaccgtctgacgcagcgcatccggcagcttggcctgacgctgccggtggtgggcgtaacggcgaacgcgctggcggaagagaagcagcgctgtctggagtcaggcatggacagctgtctgtcgaaaccggtgacgctggacgtgctgaagcagacattgtcgatttacgcggagcgcgtgagaaaaacgagaatataaaaaaggcccggaagggccttttttatttgcccggcgacgctgcgcttgcgcgggcctgcgggttttgtaggccgggtaagcgccagcgccacccggcatttacagtggagatcaatccttatccgttgcgctcagcgtcacggaggagagatagttgagcagcgcaatatcattgtccacacccagtttcatcatcgctgatttcttctggctgctgatggttttaatactgcggttcagcttcttggcaatctcggtcaccaggaaaccttctgcgaacaggcgcagaacttcactctctttcggcgacagacgtttatcaccgtaaccacccgcgctgattttttccagcagacgagaaacgctttcaggcgtgaacttcttgcctttctgcagcgccgcaagcgctttaggcagatcggtcggtgcgccctgtttcagcacaatcccttcgatatccagatccagtaccgcgctcaggatcgccgggttgttgttcatggtcagaacaatgatcgagatatccgggaagtgacgtttaatatatttgatgagcgtgatcccatcaccgtatttgtctccgggcatggagagatcggtaatgagcacgtgtgcatcaagctttgggaggttattgatcagtgctgtagagtcttcaaattcaccgactacattcacccactcgatctgttcaagtgatttgcgaataccgaacagtacaatcggatggtcatcggcaataattacgttcatattgttcatgtataaggctaccttgctacagcaagcttttgacgtaggcgtcaatgtcgctgatgtatttttcaatgccagaggcatctttctcacgaattagatgttccagcgtttcacataactgcttgccgggaaccagattaagcatggcaaacacccctttaagccggtgtgctgtctgtgccagcgctgcaaaatcattcgcagcggactcagtatacaaccgcttaacatcatctggtactgtatcaacaaagagtgaatagtatccgctggcgtgaagctcggcattttcattaccgccaagcggggattccgctatctcttcctgcgccagctgctcttctattagttgtagtacagcttcctgcatcgcattgcttatattaaagttgacgcgcagctggccagggccgattttccgcacgcctgactcatcatcgcttaaaagcaagccggaggcagtaagattagacggattatcagttaaaaacagatcaaattcttgacttgcaagtctttcatccggcgtgatgcaggccgccccccagttttctaactgacgaacgacaatattgcggatctcgttcgaggtcacatcgaccatcaccacgacatcatccagcagacgttcttcatcttcttcctgcggattggccgccattttcacgtgcagagaatagcgggtgccgagggattcacgggctttgatattcagatggccgccgagcttacgcgccagctgatcgcacagccagaaggtgagggcattggccttgccgtagcgatcgctttgcgtgtcgttcaggaacgggaagtggagattatcaatttcactcgtggtgacgccttccccggtgtcgaggatgcggaacgtcaggcggtcttctgccgactcctccgtactgacttcgagggtgatcttgccgatctgcgtggtcgtcaccgcgtactgaataatcatcaacagtatgcggcgcagcgcttcacgatcgccgtggcgctcgtcatttgccggaagattgttattgatcagcagctgcaaccctttacgcttaatcacgggcaggacttccggaaccacttcatcgatcagatcctgaatagagaagagggttggtgttcctttccagaaatcattctccagcatgttcgccagctggatctcgtcaaccattctgaccagcgagtcggcctgacaggcaagctggtggctttctgacgtatttaacgccgccgcctgggtcgccagcgtttttaacggctgcttgaaggcatcgccaatattctgcataaatgcggcgcgcccctgctggtttttctcatacagtctttgcgcctgcttgagctttttattcaccagcacctcgcgatcctgatcgcgaatgatgaaaatttgcgtgcgggaggcgacctggctgcggaactgacggatctcgtacagctcattgttgatggtggcctggatcaccccctggtgctgatctgccatggtggtgatgttctgcaggttaagatgcggcagcagatggtcggcaattttattgctcattaccgtacgattcgcttcctgatcgtgaactaagaccccaagcggcagcacggaaataatctcttcatttagcgcacgtaacacgcgcagttcattgctggtgcctgccgggaccgcagaggcgtcgctctgacgccccggctggaaacggaaggtgctgtagccaaacagcgccagcgccagcagaccgatattcagcagcagaggcagcaggatattttgcagggtatcgagcagcagcgtgccaaacggcacctgccacaccagacgcataccggtcgagttcagggacgaggcaatttcgatttttgaaccgttaaaggagatcgagacgctctctgcggcctctttgtcagaagccgcacgcatgttctgggtgctgttgtcgggctccagacggaagctgtcgagcggcatgtccggcgggattaaatcgttaatcggtaaatcgaaggccacaaccgtcgccagatgtcctggctggttgaaggtggtgcgcagggtaaaataatgaccgttttgccaggccagacgacgcagggaagagaagctctcacgttcatcaagggcattcgcctgctgcagcatctctgcccggcgggagtcgacgatgctgcccacggtggtctctttaaacccggaagagagatcttttaacggcagggttgagatcaggatcatgctgttgtcctgaccgttcagatagtacatcgaccacggcaccgtttcggccccccagagggtatccagataggtcgaaatacgctgtgtcatctcgagcgttgcgctgtcgtgagagccaaaaatgagcgcctcagtcttacgctgcggtttttcgaggtaatagacatcctgcttaagccgcgtctcctgaagtccatctccggatgaggaggccggggcggctgcaatattgtcgtaaatctgccaggtggcgtagcgccaggtatcgatgcgcttatgcacggcgtgggtgatatcgacgacctgatagctcttatccttcagccaggcgttaaccgcgctttgtaccatcacccccatggtcactaacagcacaacgatcaaaagaagaaagaaacgggtgatgctcccggggaggagggagaatttgctcggggcggtggtttcagtctgactcattgatatctttaacccgtcatggtcatgctctgtggcgatagggcagtataaagggtaataactgaatttccagcgccaccgtccgggaacaggcgactttttcaacggacaataccggcggcgggtggcgcggtaaacatgtacaaactcgtcctgcgcgtacaaataaaaagtgcggctggccagcaaatagcacgaattaacaagaaattaagttttacatcaattgtgtgttagcgaacgatcgctggggagaatttagttaatagtcgttacaatttcggtgcggtagcacaaaaaatgaggcgttgcgtaaagaaaggtaaaaaaaaaccgaatgcgaagcatccggctcaattagggataaacagacattcaaaactgaatgacggtaataaataaagttaatgatgatagcgagagatattttagagattagccgcgatcttgttttgtcattcagtgctgtaacgatttttattataagttattgattactatatgtatgatttttcttttgattataagtgctaaatttataagctatttgtgctttgtaaaagttccttgatatttacattttgaaacatcttgatggacaaatgaaacatcttcaaagttttcgtatcatattcgcattggattattctgtaattttgcggagaatgaaattgccgactggttaatgagggttaaccagtaagcagtggcaattataaggcatataacagagggttaataaaatgaaagttaaagtactgtccctcctggtaccagcactcctggtggcaggcgcagcaaatgcggccgaaatttataacaaagatggcaacaaattagatctgtacggcaaagtcgatggtctgcactatttctccgatgacgatagcgcagatggcgaccagacctacatgcgtcttggctttaaaggcgaaactcaggttaacgatcagctgaccggttacggccagtgggaataccagattcagggtaactcaggtgagaacgaaaacaacgcctggacccgtgtggcgtttgccggtctgaaatttggtgacgcgggttctttcgactacggtcgtaactacggtgtggtttacgatgtaacttcctggaccgacgttctgccagaattcggcggcgacacctacggttctgacaacttcatgcagcagcgtggtaacggctttgcgacctaccgtaacagcgatttcttcggcctggttgatggcctgaacttcgctgttcagtatcaaggtaaaaacggtagcgtaagcggtgaagatcagactaacaacggtcgtgaagcactgcgtcagaacggtgatggcgttggcggttctatcacttataacctgggtgaaggcttcggtattggtactgccgtgtccagctctaagcgcaccagttcccagaacgacatgggcttcggtactggcgaccgtgctgaaacctacaccggtggtctgaaatacgacgcgaacaacatctacctggctgctcagtatacccaaacctacaacgcgactcgcgcaggcgatctgggttgggctaacaaagcgcagaacttcgaagtggttgctcagtaccagttcgacttcggcctgcgtccatccgtggcttacctgcagtctaaaggcaaagacatcgaaaacttcggcgatcaggatctgctgaaatatgttgatgtgggtgcgacttactacttcaacaaaaacatgtccacctacgtggattacaaaatcaacctggttgatgaaaatgaattcacccgtcaggcggggatcggtactgacgatatcgtcgcgctgggcctggtttaccagttctaatcgcgccatcgtgtgacgtaaggggcctgatggcccctttttttgtgcctttctgattctcacaactcacccgttttggtgtactcttgccgccctggcatgaggataataatgaatggacatgacttttttacgcgccagctttctggctatgctttttttcctgaccgcgtgtaacgatcccgcgcccgtggcgaaaaccgacgcacctgccgcgacggtgctcgaaggcaaaacgatgggcaccttctggcgcgtcagcgtgatgaacctcgataaaacgcgcacggatgagcttcgcggcaaaatccaggcacagctggacgccgacgatcagctgctgtcgacctataaaaatgactcggcgctgatgcgctttaacctctcaaccagcacctctctgtggccggtgagcgaggcgatggccgatatcgtgaccgaggcaatgcgcgtaggttataaaaccaacggggcgatggatgtgaccgtcggtcctctggtgaacctctggggatttggcccgaataaacagccggtgaagacgcccgaacaggcggccattgatgacgcccgcgcccggaccgggctacagcatctgaccgtcatcaaccagtacgggcagcagtacctgcaaaaagatatccccgatctgtttgtcgatctgtcgacggtcggggaaggctacgcggcggatcatcttgctgcactgatggcgcaggaggggatttcccgttatctggtctccgtgggcggcgcgttggtcagtcggggcatgaacgccagcgataaaccgtggcgcgtggcgattcaaaaaccgacggatcggcaaaatgccgtgcaggcgatagtggatatcaacggacatggcatcagcacctccggaagctatcgcaactattacgagcttgacgggaagcgtatttcgcacgtgattgatccgcagaccggccgccccatcacgcataacctggtctcggtgacggtcattgcccccaccgcgctcgaagcggatgcctgggataccggattaatggttcttggcccggagaaagccaaagaggtggtccgtcaggaagggctggcggtttatatgatcaccaaagagggcgacgggtttaaaacctggagctcgccgcagttcaacagtttcctggtcagcgacaaaaattaaaaagcaaggttgcgggttttttatcggtggcactcaggcacgctctatgtatgcttatacgaggagccgatcatgaaaaacccaaccttcactaccgatgaggatcgctggcaggccgtgctggcccgcgatccgctcgctgacgatcagtttgtcttcgccgtgcagacgaccggtattttctgccgtccgtcatgccgcgcccgccacgcgctgcgtaaaaatgtccgcttttatcccgatgcccggcacgccgctcaggcgggctttcgtccgtgcaagcgctgcatgccggacaagcgcgatccgcaggcgcaaaagctggcaaaagtggaacacgcctgccggcttctggagcaggatcctgcgctaactctggagaggctggcggagcaggttgccatgagtcctttccatttccaccgcctgtttaaatccgtgaccggcatgacgccaaaagcctggcagcaggcggcgcggggtcagcgtctgcgcaccgcgcttgcgcagggagacaaaattaccgatgccgtgctggcagcgggatttcccgacagcagcagctattatcgtaaagccaacgatgcgttgggcatgacggcgaagcagtaccgtaaaggagaggtggccgttcggtatgccatcgatgactgttcgttaggacgctgtctggtcgccgaaagcgagcgggggatctgcgcgattctgctgggtgacaccgatgctgaattaaccgcagcgcttgccacgcaatttccaaaagcgacgcacgcgccgcgggacgacgccttcgtacagcggatccaccaggtcattgccagtattgataaccgcgacgtaccgcttgcgctgccgctggatattcgcggtaccgcgttccagcagcgcgtctggcaggcccttcgcgcaattccctgcggtgaaacggcaagttaccagcaggtggcgcaggcgattggtcagcccagtgcggtacgcgccgtcgccggagcctgtgcggccaacacgctggcgattgtgatcccctgtcatcgcgtggttcgcaacgacggcgcgctgtcgggctatcgctggggggcggcgcgaaaagcgctattactgaaacgtgaggcgaaacgccgggagggataatgctcgatctttttgcggatgctgaaccctggcaggagccgcttgcgccgggggcagcgatcctgcgtcgctttgctctctcccgtgcggaggcgttgcttgccggtattgaagaggtcacagcggcttcaccgtttcgccatatggtgacgccgggcggctacaccatgtcggtggccatgaccaactgcggcgaactgggctgggcgacaaacgaacgtgggtatgtgtatgctccgaacgatcccacgacaggtcggccgtggcctcccatgcctgcggttttccaggcactttgtcacgaggctgccgtggcggcggattatcctgacttccgtcctgacgcctgtctgatcaaccgctacgccgtcggggcgaagctctcgctgcatcaggacaaggatgagcccgatctgcgcgcgcctatcgtttcggtatcgttaggcctgcccgccgtctttcagtttgggggattacgccgcaacgatccgctcaaacgcatcatgctggaacatggcgatgtggtggtgtggggcagggaatcgcggctttactatcacggcattcagccgctgaaacccggcgttcaccccctcacgggcgagtaccgctttaatctgaccttccgtcaggcggggatgcgtaaactaaaataagaattattcttgatgtccgcgcagggcagtttacactgctcgctgatttttattgtccggattgcctgcatgcaactacttctccttgtctggcgtcagtaccgctggcccttcgtcgccgtcatggcgttaagcctggccagcgccgcgctgggtattggcctgatcgcgtttattaacgtgcggttgattgagatggtcgacacctcgctctccgtattgccggagtttcttggcctgctcttgctgttgatggcggttacgctcggctcccagctggcactgaccgcgctcggccaccatttcgttttccgtttgcgcagcgagtttatcaagcgcatcctggacactcaggtcgagcgcgtcgagcagctcggcagcgcctccctgctggcggggctgaccagcgacgttcgcgccattactatcgcgttcgttcgtctgccggagctggtgcaggggatcattctgaccttcggctcggcggcctatctcgcctggctctccagcaaaatgctggcggtgactgcgctgtggattgccatcaccatctggggcggttttgtgctggtgtcccgcgtctataaacacatggcggtcctgcgcgaaactgaagataagctctataacgattaccagacggtactggaagggcgcaaagaactcaccctgaaccgcgagcgcgccgagtatatctttaaccatctctatattccggacgcgcgcgaataccggcaccatatcattcgcgccgataccttccacctgagcgcggtgaactggtcaaacattatgatgctgggcgccattggcctggtgttctggatggcgaacagcctgggctgggcggataccaacgtcgcggcaacctactcactgacgctgctgtttttgcgcacgccgctgctctcggcggtcggcgcattgcccaccttgctgagtgcgcaggtggcctttaataaactcaaaaaattcgatctcgcgccgtttaagcccgaattcccgcgcccgcaggccttcccgaactggcagacgctcgagctgcgtaacgtcacgttccgctatcaggacagcgccttctccgtggggccgctcaatctgacgatccgccgcggcgagctgctgttcctgattggcggcaacggcagcggtaaatcgacgctggcgatgctgctcaccgggctttatcagccgcagtcgggcgagattttactggatggcacggcgctgagtgcggagaagcccgaggattaccgcaagcttttctcggcggtgttcaccgacgtctggctgtttgatcggctgctgggtccggaagggcagcaggccaatcctgcgctggtggaaaaatggctggcgcacctgcagatgtcgcacaagctggaacttcaggacggcaagatccttaacctcaaactctccaaagggcagaaaaaacgcgtggcgctgctgctggcgctggcggaagagcgtgacatcattctgctcgacgagtgggcggcggatcaggacccgcacttccgccgcgagttttatcaggtgctgctgccgctgatgcaggagatgggcaaaaccattttcgccatcagccacgacgatcattactttattcacgctgaccgcttgctggagatgcgcgacggcaggctgagcgagctgaccggtgaagcgcgcgatgcggcctcgcgtgacgcggtggcgcgaacggcctgatgcccgtgtgccgggtggcggcttcgccttacccggcctgggattttgtaggcccgtgcagcgtagcgccgccgggcacaatgatttgcacgatatgccgcttttttctccatcccgccccgttgtttattcttatttacatatcctcgcgctatgcttaataccaacttatttcatggatttatgattgatgtcggtattaaagaaaaacagcgccagacagcgtgaccaggaacgtgcgcgactgatctggcttcttacgaccgataaagcggttacgtctacgctattaggcaaactgaccctggctgagcaatatgatgtcggcacgttagccgacgatattgctgaggtaggtgcgctggttgctcacttacccccgccggatctggcggacaccctggaagcgcttccctcggaagagcgtcatgccctgtggcggctggtgcaggatcacgagcgcgggcaggtgctgcttgaggcctcggaaaacgtctgggacgacctgatcgacgagatgagcgaccgggatattcttgacgccctgcaaacgctggatatcgacgaacagatttacctggttcaacacctgccgcgaaacctgaccggccgcctgctggcgtcactgcctgccgatgaacgcgcgcgcgtgcgtcaggtgatgcattacgagaaaaacagcgtcggcgcgattatggagttcggcgtgatcacggtgcgcccggacgtgacgctcggcaccgtgcagcgctatctgcgtcgcctgggcaaaatgccggataacaccgataagctgtttgtcacctcccgggataaaaccctcctcggcgaactggagctgaaaaccatcctgctcaacagcacccagcggaaggtgagcgaggtgatggaaaacgagccgatggtcttctccccggaggacgatgcggagaaagcggcgcgtaccttcgaacgtgacgacctcgtcagtgccgctgttgtggactccgttggcaaactgatggggcgtctgaccatcgacgagatcgttgacgtcgtttatgaagaaaccgacaacgatctgcgtgcgctgggggggatcagcgcggaagatgacgtccatgcttccgtcggcaaggcggtgaaaacgcgctgggcgtggctggccattaacctgtgtaccgcgtttatcgcctcccgcgtgattgacggctttgaacacaccatttcgcagctggtggcgctggcctcgctgatgccgattgtggccgggattggcggcaataccggcaatcagactatcacgatgattgttcgcgcgctggcgctggagaatattcagcccggcaacttcgcctttctgatcttcagagagatgggcgtggcgctgatcaacggccttgtgtggggcggcattatgggcggtatcacctggtggctgtatgacgatatggcgctgggcggggtgatgatgctggcgatggtgctgaatcttctggtggcatcgatgatgggcgttattatcccgttgaccatgaccaaactggggcgcgaccccgcggtggggtcgagcgtgatgatcaccgccatcaccgataccggcggtttctttatttttcttgggctggcgacgatttttctgctttaagccgacgcttaatgcgggcgggaagcagcaccatgacgataatcccgcccagcacgccaatcgccagattgccggttgataccgtggcggcaacggtgaccagcatgacgaccgtttctgcaatcggggccgttttcagcgtggccggctgaaggctgtgccagctgaaggttttaacggcgacgatggccataatgcccgccagcaccgccatcgggatgttggccatcacctcgctgagcgccgtcaccaggatcagcagcacgatgcccgcagcgaaggttgaaatgcggcttcggcctttccccatctccacgttaacgatggtttgtccgatcatcgcgcagcccgcaataccaccgtaaaatccggccaggatattgccgacgcctaatccaatgctctcgcggcgtttacttgacggcgtcgcggtcagctcatccaccagctttgcggtcagcagggattccagcaggccgacaaacgcgatgctcaacgcgcacggccagattatgctcagcgtctgtaaattgagggggaccagaagttcgctaagacccggcaagccgccgctcatggcgccttcatcgcccacggtcggcaggttttgcccggttgaaacggtaaacaaggttaacagcacaatcgcaatcagcggggaagggatgcttttgaaatagcgcggcacccacagcacgatcagcaccgtcagcacgaacaggcctacaatcagcgggcttcggctccagaaatgcggaacctgcgcaaagaaaatcaatatcccgagggcgttaacaaatccggtcatgaccgactggggaataaagcgcatcagccttgccatgcccagcacgccaaacagaatctgaattacgccagccatgagcacggcgggaagaatgtactgtacgccgtgctgatgcaccatgggcccaataaccagcgccacggaaccggccgcggccgtgaccatcgccgggcgaccacccagtacagacagggcaagacacagcaccacggaagcgatcaggctgaccttcgggtcaacgcccgccacgacggaaaatgagatgacctcggggatcagcgccagggcggtaatcacgccagccagcgtttcacgcgtcagctgcttaggggaacgcagcacgctggcgacacggttttcaggagagacagcagaatggggtagggacataacgtttcgctggttagggcaggcttccgtgcgcgcgatcacaaaacgcaacatactagccagttaaaccgcgctttaccagacgcttcgataattcctcacaaacaatccatcattaaatttcacaattacaataatttcgtaacctttaaacaatatttaaaagttgttaccgtgcccccgcagcttgtttcacctgcaatttccacgcatcaagcacttttacactaaggcataaattatgaaaaaaatgactgccatgctcttttctctggccgtggggcttaacaccgtctctatggcggcgaaagctgacgcaccaaaagagcaggaaacggacgtccttttaatcggtggcggtatcatgagcgccacgctgggaacctatctgcaagaactgcagccggactggtcaatgaccatggtcgagcgccttgatggcgtggcgcaggagagttctaacggctggaacaacgccggtaccggccattcggcactcatggaactgaactatacgccgcagaaaaaggacggttccattagtatcgagaaggcggtagagatcaacgaggcgttccaggtatctcgccagttctggtctcaccaggtcaacagcggcgtactgcacgacccgcactctttcatcaacaccgtaccgcacatgagctttgtgtggggcgagcagaacgtcaacttcctgcgcgcgcgctacgccgcactgcagcagagcacgctgttccgcgggatgaaatactctgaagaccacgcgcagattaaagagtgggctccgctggtcatggaaggtcgtgacccgaaccagaaagtggcggcaacccgtaccgaaattggtaccgacgtcaactacggtgaaattacccgtcagctggtgacgtctctgaagaaaaaagagaacttcaacctgcagctcagcaccgaagtgcgcggtttcaagcgcaacgcggataacagctggagcgtgaccgttgccgatctgaaaaacaacgaagccgagcacgtcatcaaggcgaagtttgtctttatcggtgcgggcggtgccgcgctgaaactgctgcaggagtccggtattccggaagcggatgactacgcgggcttcccggtcggcggccagttcctggtgtccgataacccggaagtggtgaatcgtcatctggcaaaagtgtacggtcaggcttccgtgggcgcaccgccaatgtctgttccgcacatcgatacccgtatgcttgacggcaaacgcgtggtgctgtttggcccgttcgcgaccttctccacgaagttcctgaaaaacggctccctgtgggatctgctgagcgcaaccaccacctctaacgtcaagccgatgatggacgtggggctggataacttcgatctggtgaaatacctgattagccaggtaatgctctctgacgacgaccgtttcgaagcgctgaaagagtactatcctgaggccaagaaagaagactggcgtctgtggcaggcgggtcagcgcgtgcaaatcatcaagcgcgatccgaaagagggtggcgtgctgcgtctgggcaccgaagtggtgagcgataaggacggcaccatcgccgcgctgctgggtgcgtcaccgggtgcatctaccgctgcgccaatcatgctgcacctgatggaaaaagtgtttaaagataaagtcgccagtccggaatggcaggcgaagctgaagaccattattccatcctacggcacgaagctgaacggtaacgtgagcgcgacggagcaggagctggaatacaccagccgcgtactgcagctgcagtacatcaaaccgcaggctgcggatgctgcgccaaaagcggagctgaagcctcagccggaaaacaaaccagttgcggatatcgcgctgtaaggtaaaaaagccgggtggcgctgacgcctacccggcctatgttcggtgttgttttgtaggtcgggtaaggcgaagccgccacccgacttaattttaacgtacgacagcctgctcaatcttctcttcagctttccacacgcgatacttcacttccacgttttcaggcgtatagaccacgatcggcaacttgctgttgtagcgcagcaggctgttgtcgcccagatacgctgtcacaaatttcttctctttcttgccatccgggcaggccatcatggtggagaccggcgaggtcactttatcaaagacgtagtagtcgtaaccccagccttccagcgttttgctttctagttgaccacccaggcgatgctggttgcaatccacttccagcatcttgccaattaacagctccactttgtagttcgcttcatcctgctgaaccggaagctgaatcacctgacgcgtcatccctttatccgctttcggatacggggcgactttttccagcggctgcgctttaggtgtttcgctggcgaaagcgctggtgctgacacacgcggcagcgatgagtgcgatagcaaatttaggtgcgtttttcattgtcattcctttatgtcaaaacgattttgcacaggttaacatagcggccgtgaatgattggtgttatttacttacattttcaatatatacagcgtaataaaccagatatttgttatttatgcaggtgtttatactggcgtggagtctggcaggcgtttgtgttattttagacgctatataatgttattcatctgtaaaagggaagagagatggttcgtgcaaaactgaaaacgcctgaaggccgcaagtttctcctggcgctgctggtcgtgtttatgattgctgccgcgtgcgtggggcgtgccacgattgttggcgtcatcgaacagtacaacattcctctctctgcctggacaaccagcatgtacgtcctgcagtcggcgatgatctttgtctacagtctggtattcaccgttctgctggctataccgctgggtatttttttcctgggcggacgtgagaagcactaagcaccgatttgcgataactgagccatcctgcggggtggctttttttatgcctgataatttttattcgcctttccaggatattctgttgagagcacctttgtttacagaaagcaggagaggcttaatgcaatcccggtttgccacgctccgccagatcccaaaaggtgtctgggtggtcggtggagtaagtatgttgatggatatctcgtcggagatcattcacagcctgctgccattgtttatggtcacgacgctgggcgccagcgtcattttcattggtttgattgaaggcctggctgaggccactgcgctgtttatcaaggtgttttccggcgccatcagtgactatctgggcaagcgtaaagggctggcggttctgggctacggtcttggcgcgttgagtaaaccgttgttcgctatcgcctcttcttccggcatgattctgggggcacgcttaatcgaccgggttgggaaggggatccggggagcgccgcgcgatgcgctggttgctgacgttacgccgccggaacttcgcggcgcggcctttgggctgcgtcagtcgatggacaccatcggcgcatttctcgggccgctgctggccgtaggattgatgctgctgtggaacgatgatttccgcacgattttctggatcgcggtgctccccggcgtgctcgccgtggcgctgcttttcttcggcctgcatgagccgaaaacgcccgtcgaacataaacgcacgaaccccatcaaaaaagagaacctcaggcgtctcgggaaaggctgctggtgggtgattggtctgggggccatcttcacgctcgcacgcttcagtgaagcctttcttgtcctgcgcgcacagcagtcgggggtgccgctggcgctgatcccgctggtgatggtggccatgaatctgctctatttcctctcagcctatccgtttggcaagttatcggaccggatgagccacaccaggctactgcagtggggtctggtgatgctgattggagcagatattgtgctggcgctgagcacccactgggctggaatgcttctgggcgttgcgctttggggagtgcatatggggatgacgcaggggctgctggcggcaatgatcgcaaaaacggcgcctgcggatctgcgcggtaccgcctacggcatttttagtctggtcagcggcgtgggattgttagtcgccagcctgggcgccggggcaatctgggaaacgtttggggcggaatatacgttttatgccggggcggtgatttgtctggtaacgcttgtgtacctgcgcaaaacgccggacgaggcgaaataaaaaaccagccataagaggctggttttcaatgtatttttggtcggcacgagaggatttgaacctccgacccccgacaccccatgacggtgcgctaccaggctgcgctacgtgccgacgcatagaaagaatactactcgattccgttttgaatgcaaggaaatccgtcgctaactggtttattattaatcagttagcgacaaaacgcttctcatccgtcaggacctgcagcagcaggctcagctgcggtttctggtcttttagccgctcaccctgcaggttatacgtctgataattcccgttgctgttcagcaccagcgtcagcttcggcgtggtcaccaccagcgtattattccctgctgccgtaacccagttatggcggcgcgcggcgctgaagagatcctggccctgcgaatactcgtttgctggcgtgctgacgtgcagcaggcgttgcatcagggtggtcatcacatctttatgctcggtaagcatagtgatgcgctgcgccggggtgcccggccagtggatgaccagcggaacctgcaggttagggcgtgaccagctcatgctcttcgtctcgtcacctaacgggacgccatggcctgccgtcacgatcaccacggtgttgtccagcttgccggactcacgtagcgcgtcaagcacgcgggcaatctgcgcatcaacatcacccgccgcgcggccgtagcggcgcgcgaaatcactcttattgctgttagcaagcgttgtgccgttaaaggcaacccatgagaaccagcggttatcttcctgggcatagcgctgcagccagtttatccattggctggcggtctgcgcatcggactgattctgtgccgccggcagtgagaaatcagacagcagcgcctggcggtagagcgggctgttaaagccatcggatgagaacaaccctaactgatagccctgctgattcagcccggtgatcagcgccgcaggcgtgcgggtagagagtacgccgtccatgtatccggctgaaatgccatagaagaggccaaagatgcccgcgtcggttgtgttaccggagctcatgtgctgagtaaacgtgacgttttgactcgcgaaattggccagggctggcatctgcttctcataacgggaatagttcaggccgtcgacggtgatgagcaggacgttttgcccgcggcccatatcgcgatagcgcaggtcgctcagcggatactgcacgctgacggcttccgggttaccctgctcgataaggcggcgctggtactcctgcgcatcaagcaggccatgtttctcgaggaagcgacgggccgtcatcgggtacgagagcggcaggttcgcgcgctgcatggtaataggacgatagaagttcgcatccgcccagatatacatgatgtgcgaactgataaaggagacgaagaagagcgcggcgacgggcttcgcgtaatggcgtcggcgggtcaggctacgcagtttttgccagctccaggtggcaaacagcatctcaatcaacaggatcaccgggacgctgataaacatcagctgccagtcgcgggccgtttcgttctggtcggggttaatcaccagctcccagacgatggggttgagatgcaggtggaagcgggtgaacacttcactgtcgataagcagcagcgtcattcccaccgtcgcaaggatggcggacaagaatcgcatcagacgctgcgacatgacgataaacgtcagggggaacaggatcagcagataggtggcgaaaaccaaaaagctaaagtgaccgacaacgcttatccaggagtagatacgcccggtgagcgttgttggccagtctgcgacaaacagataacgacagccaatgaccgtcgccaacagaatgttgaacagggcaaaccagtgcccccagctgaccatctgggagactttttcacggtagcgctgacgattcgtcaccataaactgttgttcgtatcccttaatgggccgggtcgttgctaacggacgactgtaaagcctgggcgaaagattttgcgatcgcctgacgttgagccggagcaacgctggtgttaatcaggttggtgaccatatttcccaaaaccatcagggagagatcggtcggcgttttatgtttttccagtacgttgaccagctcactgagcagttgttcaacgtgttcatcactgtagcgggaatgttgtggcataaatcaaaatcagtttgttgatgaaagggcaacatattaccgtagcaacagctttttttccccttttttatctgttgttgcacacatgtcctggtggtggttgaataccgcccggtctaaaaggagagtttatcatgagtctggaaatcaaccagattgccctgcaccagcttatcaagcgcgatgagcaaacccttgaagtggtgctgcgcgattcgttactggaacccacggcgaccgttgtggagatgatggcagagctgcatcgcgtctacagcgccaaaaataaagcctatgggctgttcagcgaagagagtgaactggccgatagcctgcgcctgcagcgccagggtgaagaggatttcctggcgtttagccgtgcggcaaccgggcgtctgcgcgacgagctggcgaaatacccgttcgccgacggcgggatcgtgctgttctgccactaccgctatctggcggtcgagtacctgctggttaccgtgctgaataacttaagcagcatgcgcgtgaacgagcagctggatatcagctcgacgcattatctggatatcaaccatgcggatatcgtggcgcgtattgatttgaccgagtgggaaaccaacccggagtcgacccgctacctgactttcctgaagggacgcgtgggccgcaaagtggcggatttctttatggatttcctcggtgccagtgaagggcttaacgccaaagcgcagaacaaagggctgctccaggcggttgacgatttcacagccgaagcgcagcttgataaatctgagcgccagacggtgcgccagcaggtttacagctactgcaacgaacagctgcaggcgggggaagagattgagctggagtcgctgtcaaaagagctggcgggcgtcagcgaagtcagcttccaggaatttaccgcagagaagggctatgagcttgaagagagcttcccggcggatcgcagcacgctgcgtcagttaaccaagtttgccggcagcggcggcgggttaaccatcaactttgatgcgatgctgctgggggaacgtatcttctgggatccggccaccgatacgctgaccattaaggggacgccgccgaatctgcgcgatcagcttcagcgccgcacctcgggcggtaaatagcaggcacaaaaaaccccgcagaagcggggtttttttcgacaggtttgcgattacgcgcgaacgaagtcgatgtgagtcagttttggcttgaacgcgtgacgctgaacagcctgaactttcactttttcttctttaccgccaacaacgatggtcagaacttcgctgtagaattcagctttggtctgcaggttccacagtttgtcgtgatccagttcgattgcaactggagcagcttcgccaccgtaaacgatagccgggaacttgttagcggtacgcaggcggcggctcgcacccttaccctgcacgttacgtacttctgcttcgatagtgaacattgatttctctctgtatttaaaaccctactacaggcgacccagcagcaggtgagtgttctgcctcacggatgtgaagcgggcggcattttatactcaaatgcccctcacatcaatgaaaagtcccgctacccgcgcaattcgttggcgcgacggaagcgaccttcgtagtcaaagagcttctcgcgcacctgccagtactggcctttcttacgggcgacgacaaaatccggatggcgcaatagcacctgctggcgcacgatatcggccacggtgatccagcgcaggggcacgcccggggtgcaggtgtgcgggcgaataaacagctgttcgaaggccgttcgctgggcaggcgtctggacccggaagcgctcgctgacgtccgccccgtcctcgtcgtaataggtgattttcagccattcgcctttttcatccgcgccgggctgcagcgccatgccggaacagcgcagcaccagcgcatctttcagctttagcgccgctttcagcatgtcgtccgggtcaaccagcaccgtgtcgcactcccgacagcggcgagcggctatgtcattttcggtgttgcactgcgggcagtttttgaagcggaaacgaaaatcgcactgctcgcgatgcccttcatcatcttcaaaccagccctgacagcggcggccaaaatgttcaatcagcgtaccgtcggcggtggttttgccccagaaggtgttggcaaacccgcaggcagggcaaaagacctgcacgggcacgttgtcgctttttccttttggcgcgccgacctcaggcgtatagagatcgtgcgggttaccggcataatccaggatcagacagtcggttttccccggcgccagacgcaggccgcggccaacaatttgctgatacagactgacggattcggtcgggcgcaaaatagcgatcaggtcgacgtgcggggcgtcaaagccggtggtcaataccgacacgttaaccagatagcggaactgctgggctttaaaggcctcaatcaggcggtcgcgctcggggccgggcgtctcgccggtgatgagcgccgcgtcgccggagggcagtaacccggtgatttcgcgcgcgtgctcaacggtggcggcaaagatcatcacccctttgcgcgtcgcggcgaactcctcaatctggctgatgatatgtggcgtaatgcgcttttgctttttcagctcctggttaagatccgcttcgctgaataacccgttgctctgcgcctgcaggcggctgaaatcatactgcaccaccggcatatccagccgttcaggtggcgtcaggtagccatgtttaatcatgtagcgcagcggaagctcgtagatgcagtcgctaaacagggccttgtcatcgccgcgcaccatgccgtgataatggtaacgatagatccagcctttacccagacgaaacggggtcgccgtcaggcccagcaggcgcaggtgagggttcacgtctttcaggtgcgtcaggatttgctgatactggctgtcgtcgtcatcgctgatgcggtgacactcgtcgacaatcagcagcgaaaattcgctgcgaaacagatccagattgcgggccaccgactgcacgctgccaaacaccaccttgccgtggctctctttacgctttagaccggcggcgaaaatgtcggcttccagtccaagtgcacaatacttggcatggttttgcgcgacgagctctttaacgtgcgccagcaccagcacgcggccgcgggccagacgcgccagctcggcaatgaccaggcttttgcctgcaccggtcgggagcacaatcgccgccggctcgcgatgtttacggaaccaggcgagggtggcgtcaacggcttcctgctgatagggacgaagtgtaaaagtcatggggtctcggtttcgttattccgcacatagtatgccacgaaactttttcccttgagtggcgcaaccagaccattatactgaaccgttccagactgcttctattttcggacctgttgtccgacttcctgcaccattaaggctaaaaagatttcatgcgacttgataagtttatcgctcagcaactcggcgtaagccgcgctattgccgggcgcgaaattcgcgccagccgcgttaccgtggatggcgacattgtgagagacagcgcgttcaaactgcaacctgaccatcaggtggagtatgacggcaatccgctgacccagcagcacggtcctcgctacttcatgctcaataagccggaaggctacgtctgctcaacggacgatccggatcacccgacggtgctctatttcctcgacgaaccggtggcgcacaagctgcatgccgcaggccgcctcgatatcgacaccaccggtctggtgctgatgaccgacgacggtcagtggtcgcaccgcatcacctctccacgccaccactgcgagaaaacctatctcgtgacgctggagtcaccggtgtcggatgacacggctgagcacttcgcgaaaggcgtgcagctgcataatgaaaaagatctgactaagccggcggtgcttgaagtcatcaccccgacggaggtccgtctgaccatcagcgaagggcgctaccatcaggtgaaacgtatgtttgccgcggtggggaaccacgttgttggcctgcatcgcgaacggattggtgcgattgaactcgatcccgaccttgcgccaggcgaataccgtccgttaacggaagaagagatcgccagcgtcggcatgccttcgcactaatttcaggagaaccctgtgaccatcaggccacactcgtcgttcaaaatcgtcttcattcttggcctgctggccatgctgatgccgctgtctattgatatgtacctgcccgcgctgccggtcatttccgcgcagtttggcgtcccggcgggcagcgcgcagatgacgctcagcacctatattctcggctttgcccttggccagctgttttatggcccgatggcggacagccttggacgcaagcccgtcattctgggcgggacgctggtctttgcggccgcagcggttgcctgtgcgctggcccagaccatcgatcatttgatcatcatgcgtttcttccacggtctggcggcggcagcggcaagcgtggtgattaatgccctgatgcgcgatatctacccgaaggaagagttctcccgcatgatgtcgttcgtgatgctggtgacgacgattgcgccgctggtggcgccaatggcgggtggtgcggtgctggtgtggttcagctggcatgtgattttctggatcctggccctggccgcgctgctggcctccgcgatgatcttcttctttatagatgaaacgcttcccgtcgagcgccgccagaagtttcacatccgtaccaccatcggcaactttgcctcgctgtttcgccacaagcgcgtgctcagctatatgctggcaagcgggttcagcttcgccggaatgttctccttcctgagcgccgggccgtttgtctacatcgagcttaaccacgtgtcgccgcagcacttcggctattactttgcgcttaacatcgtcttcctgttcatcatgaccatcatcaacagccgctttgtccggcgggtgggggcgctgaacatgtttcgcgcggggctgtggatccagtttgtgatggcgatctggctggtgatgagcgcgtttctgggcgtgggcttctgggcgctggtggtcggcgtagcggcctttgtcggctgcgtgtcgatggtgtcgtccaatgcgatggcggtgatcctggatgagttcccgcacatggcggggaccgcctcttccctggcggggacgttccgcttcggcatcggcgctatcgttggcgcgttgctttctatggccacctttacgacggcatggcccatgctgtgggcgatggctttttgcgcaaccagctcgatactcttctatctttacgccagtcgaccgcgaaaagcggcccactaaaacacagagaaggcccggcagggccttttttgttgatgcatatcaaccaaacccccgttcgtttatgccgtgtttgtttattttatgtaaaatctatttgtgtaaaaagtcacatcattgtattcaaaaaggttgagttagatcgcagaaacgggtacatatagcgccgacgcgagcctgaataccgataaaaaagtgctgaatagtgcaggctggcgatgatgtgttactataaatgtaaataaattgtgaagtaaattttgcttccggggaacgaacgtgaatacattaccactttctattgtccatcgcttgccccagagctatcgctggtcggcgggttttgctggttcgaaagttgaaccgattccgcaaaacgtcgcgggctgtgaaaactgcctggtggcgctcaagctgctgagcccgagcgatgaaaatgcatggcgggtgatggagcgtctcagtcaggccctgacggatatcgaagtggacagctccgtgctggaatgcgaaggggagccgtgcctgtttgtgaaaagccaggacgagtttgctgccacctgccgcctgaaaaattttggcgttgctattgcagagcctttctccggccagtatccattctgagcgctagtctgacgacaacagctggcgcgtgtagcgctgcgttggcgcgttaaatacgcgctggcactctccctgctcgaccacctctccctgtcgcaacacaatcacctgatggcatagcgcccgcaccacctgcaaatcatggctgataaagatataggccagccggtgcttttcctgtagccctttaagcagcgccaggatctgcgcctgtacggtcctgtccagagacgacgtcggttcatccagaataattagctctggtttcaggatcagcgcgcgggcaatggcgatacgctggcgctgcccgccggaaaattccgcaggatagcggtggcgcgtctcgggatctaaacccacttcaaccattacccgcatgacctcctgctcgcgctgctgcgcgctcaggccggggtgatggacgcgcaggccctcttcgacaatctgtaacacgctgagccgcgggttaagcgaggagttgggatcctgaaagaccacctgcatgcgaggacgtacgggcagcatctgccgccggttccagcggtgcagcggcatgccgtcaaacaggatttcgccctgtgaggcaattaagcgcagcagcgccagaccggtggtgcttttacccgagccggattcgcccaccagccccagggattcccccgggcgcagcgagaagcggatattttttaacaccgggttgcgatcgacaatgcggcgcagaatacctttgcggatcgggaacgagacggacagatcctcaacgcgcagcagcggcgtgctgtcagcgtcgaggggaaccgggtcgccggagggttcgctgtcgagcaggcgctgcgtataggggtgttgcggcgcgctcagcagcgtggacgccgcattctgttcaacacagcggccgttttgcatcaccgcgacgctgtcggccagctttctcacaatgctcaggttgtgcgtgataaacagcaggctcatgtttagctcgtcacgcaggtcccgcagcagcgtcagtatttgcgcctgtaccgtcacgtccagcgccgttgtgggctcgtcggcaatcaacagctcggggcgcgtcagcagggccatggcgatcatcacgcgctggcgttcgccgccggagagctgatgcggaaaatcattcagccgtttggccgcattgcgtatgcctgtgcgttcaagacaatccagaatttctccccgcgcggcctctttgcgcatcccacggtgcagggagagcacttcatagagctgtttttccaggctgtgcagcgggttaagcgacaccatcggctcctggaagatcatcgcgattttgttgccgcgaatgccgcgcagggtctgttcgtcggcgtgcagcagcgaacggccatgaaaaaggatatccccttgcgggtagctcaccggcggagaaggcagcagccgcaggatggagagcgccgaaacgctcttgcctgaacccgactcacccaccagggccaacgtttcaccgcgctggatctgcagcgtcaggtcgctgaccacggtgcgcgtctcgtcctgttttgaaaaggcaatcgacaggttatcaatacggagcaggggctgggtcatcttataccgccttgttcggatcaaaggcatcgcgcacggcttcgccaataaaaatcagcagcgacagcagcacggccacggaaagaaaggcggcgatgcctaaccacgtcgcctgcaggttgttcttgccctgcagcagcagttcgccgagcgacggggaacccaacggtagcccgaaaccgagaaaatccagtgaggtgagggtggtgatggagctgcacagaataaacggcaggaaggtgagcgttgccaccacggcgttgggcagcatatggcggaagatgatcccgcggtcactcacgccaagcgcctgcgcggcgcgaatatagtcgaaattacgggtgcgcagaaactcggccctgaccacaccgaccagcgccatccagccgaacaggacggtaatgcctaataaccaccagaagttgggctgtacgacgctggaaagcaggatgatcagaaacagcgtcggcatgcctgaccagacctcaatcacccgctggccccagaggtcaattttcccgccgtagtagccctgaatggcgcccgccacgacgcccatcacgctggagaagatcgtcagcatcagcccaaagagaagcgaaatacgcgtgccatacaggatgcgcgccagcacgtcgccgccgttagcatccgttcccagccagttttgcgcggagggcggggaagggaagggggtcgtggtggcgaagttaatgctgtttgcgccaaaacgcaccggcgcccagagcgcccagccgtgctgctcaatctgctggcgaagccacgggtcctgatactccgccggcgtcgcaaacgggccgccaaagtcgctttcgttgtaattggcgatgaccggcacgtaccagcggtcgttaaaatgcaccagcagcggtttatcgttagcgatcagttctgaaaacaggcttaagacaaacagcacggcaaaaatccacagcgaccagtagccgcggcggttgtggcgaaagcgggcccagcgggcctggttgacggggcttaaacgcggcatcatcggccctcaaaatcgattcggggatcgaccagcgtatagctgatatcgctgatgatattcagcagcaggccaatcagggtgaaaatatagagcgtgccgaacattaccggatagtcacgcgacacggtggcctcatagcccagcaggcccagaccgttaagcgagaacatcacctctatcaacagcgagccggtaaaaaacatactgatgaacgtggccggaaatccggcgatcaccagcagcatggcgttgcggaacacgtgcttccacatgatctgcttctcgctcacgcctttagcgcgggccgtgacgacgtactgtttacgaatttcatcgagaaaggcgtttttggtcaacatggtcagggccgcaaacccgccaatgaccgtggccagaaccggcagcgtgatatgccagaggtagtcggtgattttctggtaccaaggcagggagctgaaatcggcggagacgagcccccgcagcgggaagagatcaaaataactgcccccggcaaaaaagacgatcagcagaacggcgaacagaaacgccgggatggcatagccgataatgatgaacgtgctgctccagatatcgaaccggctgccgttgtacaccgctttgcggatcccaagcggtatagagaccagatagatgatcagcgtaccccacagcccgagcgtgatcgaaaccggcaggctttgcttgatcagcgtcagcactgacgcactgcgaaacaggctatcgccaaaatcaaagcggatgtaatcccagagcatcttgaaatagcgctcgtgaatcggtttatcaaagccgtagcggtgggtgatctcggcgatcacctccggatccagcccgcgtccgccgcggtaatggctttcgctgatattccctacgccagttcgcgcatggctggcgcccatcccttcaccgccgccgcccggcatgccgccgctgttgccaaattcaatggcggcaatggcctgatcgaccggcccaccgggagcgatttgcacgataaaaaagttaatcgtgatgatggcccacagggtggggatgaccagcagcagacggcggagaagataggcacccatgataattccttatcgccgctcagcgggaagactggcggctttgttaacgtcataccaccaggtgtcaaaacccagagaatagaccgggcgcacggcaggcacggagaacttatcccagcgcgcaaggcgatcttcgcccatataccacatcggcagcatgtagtagttccaggttaagaccctgtcgagggcgcgcccgagcggcacgagcttgtctttatccccctgcgccgccacgattttcgcaatgagcgcatcaatcgccgggctttttacccccggcgcattgtacgaggagtcgatgtagctggaggcccaggagatttgcaggtccgagctaggccacggctgcgcgggccacaggcgctgcatcatgtcgtaatcacggctgcgcatgcggctggtgatctgcgcgttatcaacctggcgaatgttcatggtcacgcccagccgctcaaggttgtgcttaaacggcagcacccactggtcgttgcccccggacgagagcagcagttcaaagctgagaggcttgcccgttttggcatccacacgtttttgattcttcaggtgccagcctgcgtcatccagcagcttgctggctttgagcaggttgtcgcggtcgtaaccgtcacccttcgatgcgggcggctgaaacaccgttgtaaacacctctggcggtacctctgctttaaggggggccagcaggaccagttcgtcggctttcggataatcgcgcgcggcgtattcggtattctgaaaatagctgttggcgcggctataagccccgtaaaacagcgctttgttcatccactcaaaatcaaaggccagggagatggcttcccgcacccggcggtcattgaataccggacgctgaatattaaacgccagccagcgggtgtcctgggcagattcatttttgtgttcgtctttgacgatatagcctttggcgaaatttttgccgatatagcgggtcgcccagtttttggcgctgctctcgacgcgcaaatcgaatgccccggctttgaacgcttcaaacgccacgttatcgtcgaggtagtaatcatagcgaagggtgtcgaagttccagcgtccgcggttgaccggcagattggccgcccagtagtctttgacgcgggaatagacgacatattgccccattcgccagtcggtaatgcggtaggggccgccagccagcggaggcgttgaaagcgggtcgctcagcttatgatttttccagaacgattccggcatcaccggcagcgagaacaggctgagcatattctctttgttcggttcgctcagctcaatgcgcacagtgagcggcgcgatggctctgaccgacgcgcctttatatacgatgcggaactgggggacgccttcggtcatgaatttatggaaggtgaacgcaacgtcgctggccttcaccggtgcgccatcgtgaaaacgtgcccgcgggttcagcgagatttccgcccaggcgaagttatcggcgtaacgtacgttctcggcaatcagcggatagtagctgccgggctcgtcatcggaggtgacaaagagcgtatcgtaaagcgattccgttcgcgcggccgccacgccgcgcagggcgtagcggttgaagttgtcgaaggttcccgtggcggaaagcgtgaccttaccgccttttggcgcggctgggttgacgtaatcgaagtgcgtaaaattgaccgcgtatttcggctcgccaatcaccgcgaaggcgatattctctttgatggtttgcgcctggctggacaggctcgtgaatgccaacatcagcaacataaagcgcataagcatctcgcggcagctccctctctacagaccggctcggttaagctgaataataagtgacgtcacgggtaatgtgaaattaatcgccttcgggcgaaatatcaggccgccattcgcggaactgcgccagcggcatcgggcggctaatccagtatccctgcaggaagttaacgccgtgttcgcgcagccaggccgcctgttccggcgtctctaccccttcggcgacggtcgacatattcagtcgtcttgccagcgtcagaacagcatccagcaccggcgacgtcacggtctcggtaccgatcgcattaacaaaaccacggtcgattttgaggtagtccatggtgaaatgctcaaggtaaatcagcgcgctgtggccggtaccaaaatcatcaatggcgatttcaaacccttcgttatgcagccattcgaaaagggtgttggcctcccgatggttgagcatatcgcgctcggtaatttccagcacgatctggaagtaatccggcggcagcagggctttgaaggtgcgcatatcgtccttgaagctttccgcatgcagatgccccggtgcaatgttaatacccacctttgcgcccggaggtaacagcgtttgtaacacgggcgcatcgtgaatgataaggtcaaagagatgcagcgtcagcgggacaatcagcttctgtgcttcggcaaaattgataaacgcgtccggcggaatttcccccattgtcgggtgtttccagcgcatcaggacttcaagcccggtcatcctgagcgatttggcatcgacgacgggctgataaaccacataaaactgaccgcgcttgatagcgcttaaaatttctttacccgggttgagccgaatgctgaggatgtagtagttaagcgatccggcacaaatcccgcataccagcccgaagaacagcgcgtagagaatttcatcgctggtccatgcgtccgcatacaggttgatggtcagggggaggtctttcagcgtcgccgtgcggaccgggatgtcatgcaattcgtgggtatgaaccagcgtgctggaccgcgtcgacaaggcgttatcgccgataatgatagcgatacccgcgaactcgtcctggcgctcagtatagagcaggtaaggcgtcagattaatattcacagaagtgaacaccccgccgtccttcactaatgggttgcggtaccagatcgcaatcgcaggttcatcaggcagcatgggggtacccggaagcaacgccatatcgatctgtttattgatgttcagctcaggtatgagcgtctccatcggggcattcatcgggcctgttgccgaggagcagaatgccatcttgtcccggaccagcaggaaggcgcgaacgttaatgctgaaggccgcgcgtgaggtgagttcctggttgacgtcctggcacgtgttcagcgtgagaggctggaggacattgaccgctttttttaggtcttcgaaatagctccccatgtaggcgctcacatcattcaccagggtgtcgaatttgacttcccgcttgtggtaactccacgaaaattgcagggaacccaggagcagggcggtgatgagacccgtgataatactgaggatcagtattttacgattactggagaagtagcgggtgagcatagacgtcgtgattcctgaaaagccgcttgatgtattcagtgtaacgggcaaaaaaaaacactgccgaagcagtgctttttttcatcatatcgccagccaagggataaccaacgatacaatagttatattaactgcgggtcagtacgcggcgcgcttcgttataacgcttcttccagtacggttcgttcatgctggaaatggtcacaccgctgctggtggaggcatgtacgaactggtcattaccaatgtagatgccaacatgtcgacctgtagaccccgcgcggaacagaactaaatcgccggtgcgcagtttggtacgtgaaatcgacttgcccatctcctgctgttcataggttgaacgcggaagatctaacccaaattgctcgcggaacgtacgctgtacaaaaccggaacaatcaatacctgttttcgtgctgccgccaagacgataacgcacgcctttccagtcagcatactggtccataatgcgggacttcacgtccagattacgtaccatattttcaaattcatcctgagaggcttgcagtgaagaggaatcttccattcccacaacacgcgtctcaggatgcatattcttcgcggtgttcgatgtactacatgcagataacagtaccgcgactgctatcgccgggatcccccgcaagatatatctcagaaacggttgagatttgaccattttgtttattttcccttgaagtccttaacgacaaatatcgttataaaaatgccaaacgtgacgagactaattatctgttcacatcgagacaattctttctggtcacatttgtggcatagcgcacaaaattattcaccatcgaaataattatccctatggggcaaaacgagttcgagattaaccgattgccaggggtattgcgagtaaaaaaagccttttttttataagaaaatgtgatacagaaagtaaaaatccgtaattgcttaaaatgcggtcagatccgacgcgtgatcgcgcaattgcttcatttttatcatgaatgtgatgacaagaatatgacagagggaaaagatcgtggcgggaaggctatcggggatcatgtcgatccctgatagctcacgttaatttaggttagttatttgtttaattgttgttgcgctctaccgggaagatagcgatcgaacaacgctattatcctgtcgctcagcggggtcattaaacaccacggcagcgcaatcagcgcaacggagagcgaaccgacagcaatatcggtgaaccagtgagcgccaatcattacgcgcgggaaggcaaaaaccacaaaaataatcagggctatggcaaacgcttttcggccgaaatagcgaagcatgactgcggaaaaaatgagcagcatcatgccgtgatcgccggggaaactgtccttcgacgcatcttttgttggaatatgcagcagctcactgacgcgataaatatcggtgaaaaagagcgtagggctggaacgcttaaccggaataatcgcggtagccagctgattaatgacgacagcaaacagcagcattatcagaccgataatcagaatacgccgacgtcccgctttatcctctttcagccagaaagagagcatcaggcagcccatggccagcagcgagaagccgtcgaaggcgcggttgttggtgatggccaccagccacaggaatgcgtcgctcttcaccagcgcctggttgaagaagtgaaagatgccagaatccagggggaaccagaaaccatgattcgccgggatataccaggagaagaaaagcgccagaccggcgacattaagcagtaatatcaggggaaatcgagttgtcataacgttctgcatagagtgaaaactggggcaacgttagccgcccgaacttaaacgaatcctcaacaggctggactggagggcattccagtcggcgttaaccgcactaattaactctattcggctgtcaggcggcgccacgttctgcgtttcaatgaagaaatcgtcgccctggcggttgatccgcaccagtccgtccggcgtgcgcatgatccctttcacgcgatcgacgggcgcaaggcgggcccactccagaatcccgatagtatcgaaaacggtctcagcatcgaaaatccatccgcaggcctggtatccctggccgctgttcaggttacgacgccagcgctggtgctccggcaggctcagggctgccagaccctgcttaaccggatggctgtgcgcatgatccgcgctggcaggcagctcggtgaggttcagacgaggcaggtcaagcagggtgctatcaatattcccctgggtggtctgcacccgcgtgcgattgccgccaaaatgttgccaccacgcctccagcgcggcctggctttcaggcgtggcgcgatcttccttgttggcgacgataacgtctgccgaggcgagctgatcgcggaagttctcgttggccaccgccttgtcatccagaagctgacgcggatcgagcaggcacagtgtggcgcgcagatcgatccacggctcgtaaaccggggcggtcagtaaatcgaggatctgcttcgggtggcccagcccggtcggctcaatcagcaggcggtcgggtttgccctgacgcagcagggtattgagccccacctgcatcggcaggccattgacgcagcacatgcatccgccggggatctctttaatcatcgcgccgctggatgacagtaacgcgccgtcaatgcccacctcgccaaattcattgaccagcacggcccacttctcggccggatctttattcgccagcaggtggagaattgaggtggttttaccgctgccgagaaaaccggtgatgaggttggttttggtcacgtgcgctccagatgagaatgatgatgcgataacactgttctctatcctggcgaaaaacgtgacctgtgagaaggggaagggcgaacggaggctttatccgttcgcgttaagcgcaacaatcgttaaatatttaacgtttcgataacagcctgacgtgcgccgtgacgggtgatgcgctgataggcctggctaacagcctcaacaaaaacacgattgtgcgcgagatcgtgaccaaacacttcgcttagccccagcagcgcggggacgcggtcgatgtcgctgctggcgttgacgatcgtgcggattttatcgctgaggggatcgcgaacgtcaatcgcgttgccgcgctcgtcggtgccgctgacgtagcgtatccagcctgccacgcccagggccagcagcgaccacggcgtgtttcgctcaagatgaacgcggatcccgtccagcattctttgcggaagcttctggctaccgtccatcgcgatttgccaggtccgatgctggagggccgggttggcaaagcgttcgattaggctatcggcatacgcggtgaggtcgacatccttaatccgtaacgtgggggcctgctcgttcagcatcagccgacgggcggcttctcggaacgctgtgtcctccatgcattcattaatatgcgcgtagccggcaagatacccgagatacgccaggaaagagtggctgccgttgagcatgcgtaatttcatctgctcccacggcagaacatcctgcaccatctggacacccgccacttcccactcgggacggccggcgacaaaattatcttctattacccactgaatgaacggctcgcagctgatggcgcacggatcttccacgccgagcgcgtcggtgatttccgccagcgaggcctccgtcgcggcgggaacaatcctgtcgaccatcgttccggggaagcttacgtgggtatcgatccattcagataaccctgcggaacgtttttgcgccatgccgagcacggcgtttttcaccacgtgcccgttgtccgggatattgtcgcaggagagcacggtaaaggcgggcaggccgcgctcgcggcggcggtggagcgcttcgaccaggatcccaggggcggaatgtggctctgaggggttttcaaggtcgtggacgatccgggggttattcaggtcgagtttcccggtcgcgggatcgatgcaatagcctttctctgtgatggtgagcgagacaatcgcgacctgaggctcgcaaaatttctcaataatagcgggcagggagtccagctttgcgttcaggcattcatggacggcaccgacgataatcgcctcatttccttcagcccctttttccagcacggtgaacagatgatcctgcgcgcgcagctggctcatcagcacgtcgccgctgaagaggctaatctcacaaatcccccagtcgccgcctttttcattcagcacccgatttgttaacaaggcctggtgcgcacggtgaaacgcgccaaagccaaagtggacgatgcgggagcgcagttgctgacgatcgtagcgcggttgctgaacccgggcaggaagggcggtggaggcaattgtcttcatgagatacacctgattaaccattaattaacaatgccagtgtaaagttatatgacagcaaataaaattggtaagccgtaaatatccccgttatgtgagtttgatcaatcaatgtgtggcggtgtattgacccttcgcggtaaacatgtatggtagtcgtcattgtagtaacgcatattggtataacaacttgagagggtgaggcaatggaacaaacctggcgttggtacgggccgaacgatccggtttctcttgatgatgtgcgtcaggctggcgcaacgggtgtcgtcacggcgctgcatcatattcctaacggtcaggtctggccggtagaggaaatccagacgcgtcaggcgctgctggcggagaagggattaacctggtctgtggtggaaagcattccggttcacgaagacatcaaaacccattccggcgagtatcagacctggattgccaactatcagcagagcatccgtaacctcgcggcctgcggtattgataccgtttgctacaacttcatgcccattctggactggacgcgtacagacctcgaatatcaaatgccggacggctcaaaagcgctgcgtttcgatcagattgcctttgcggcattcgaactgcacattctgaaacgccctggcgcagaagcggattacaccgcggaagagcagcagcaggcgcgcgcgtggtttaacgccgccagtgacgcagacatcgaaaagctgacccgtaatattattgcgggcctgccgggtgccgaagaggggtatacgctggatcagttccgcgcccgcctggcggaatacggcgatattgataagcagcagctgcgtgaaaacatggcgtacttcctgcgcgcaattgtgccggtcgcggaagaggtgggggttcgcctggcggtacatccggacgatccgccgcgtcctatcctcggcctgccgcgtatcgtgtctacgattgaagatatgcagtggctgaaagagacggtcgacagcatccacaacggctttaccatgtgtaccggctcctacggcgtgcgggcggataacgacctggtgcggatgattgaaaccttcggcgatcgtattcactttacgcatctgcgcgcgacctgccgtgaagagaatccaaaaaccttccatgaggcggcgcacctgggcggcgatgtgaatatggtcgcggtggtggacgctattctggcggaagaggcgcgtcgcaagcaggctggcgatgtgcgtcctatcccgtttcgtccggatcacggacaccagatgctggacgatctgcgtaagaaaaccaacccgggctattcggcgattggccgtcttaaagggatggcggaagtgcgcggcgttgagctggcgctgaagatgacgaagtatccggagctgctgtaaacggaattgccgagtggcggcttcgccttacccagcctacaaaaacacaaaaaccggcttcagggccggttttttcgtaggtcgggtaagcgtagcgccacccgacaaacgccgcaatcagtcagcgcgacccatatagcgtttttcttcgatatggatgcggattttctcgccagcagaaaggtattccggcacctgcacaaccaggccggtggtcagggtcgccggtttgttgcgggcactggcggatgcgcctttgatgcctggtgcggtttcaacgatttccagatcgacggtctgaggcagttccagcgccaacagcacgccgtcccaggtcagaacctgcatatcaggcataccgccttccgggatgaacagcagctcttcttcaatctggtctttggtaaagatatacggggtgtaatcttctttgtccatgaacacatattcgttgccgtcgatgtaggagaaatcaacatagcgacgggtcagggtcacggtatcgacgatatcgtcacctttaaagcgctcttccaccttcaggccggtacgcacatcggcgaaacgcattttgtacagcgtagctgcaccacgggcgcttggtgcctgaatatcgatatctttcacaatcagcaatttgccgttgtaattcagtaccatacctttcttaatttcgttcgctcttggcattgcagtaatcctgtttacgggaggtaaaaaatatcgcgccaaattactcgcgcgcggcctttcaggcaagaggaattcgtggcttttgctatcaatacacaaaaggtgttactgtgcgcgcgatgcccgaccgtacgggcattcgccagcgaaagagagcatttatggattgtcgtcccgattgtggcgcgtgctgtactgcaccgtccatttcaagccccattccaggaatgcccgagggcaaacctgccaatacccgctgcgttcagctctcggaaacgaacctgtgcatgatctttggctcaccgttgcgcccgaaggtctgctccgggcttcagcccacggctgaaatgtgcggcagcacgcgagaacaggcgataacgtaccttcttgaactggaagcgctcaccgcgccttaaacgtctttaatcctcgccaggcagcccatcgtcagcgtacacatcaccagcgcaatccagaacaccgtgtgatagttccagatttcggccacgacaccggccattgaaccggcaataatccagcccacgcgggtggtattagtataaagggtggtggcggagcctgcctggcccggcatcagatcctggaaataaagcatgcctatcccggcgagaataccaatatagatagcgttcaggagctgtaacgccagcaatagcccgggggtatgtaccgtcagcatgccgagatagaacagcagaccggcgacggcggcgatgcgcattaaaaaacgtttcccgaagcgctttgcgtaatagcctgcgataagcatggtcgggatctcaagcccggctgcggtgcccatcatgatccccgccagcttctccggcaggtgcagttcattaatgataaacagcggcatattgatgatatacaggctattggtgccccacatcagcgtgcagatcgcgaacaggagcagggcatcgcggcggtgacggcgcggcgcttccagcacacctgttgccaccttgggctctttgcgcattgacggcaggaagaaccacaccagcgcgccgcacgccacaaacgcgactgccgcgctcaggtacatcaccgtaaagccaaaacccatcgccagcgcgtaggccagcggcgggccaatcacccacgccagcgacacctgcgcacgcaggacagagctgaacatcaccgcttcacgtccggtatggtcggcgtgttcgcgggcaagcgcaaacagctgtgggttagccgtcgagccaaagctgctcaggaataccccgacgaaaagcagaatgaagtagttgcggttccaggcaaacagaacgcaggccatgacccccagcaggcagcagaaaacgatcaggcttttacgatcgccttttctgtcggatcgccccgccagaaactgactgaccagaatgccgatgatggcgcttccggtaaaaaagaagccaaccagcgccggacgaacatgaacctcattggtcagaaataagctcagcgtcggcgtctgtaatgcaccggcaatgcccgtgaaaaaggcaacaatcaggaaggccgctgaggtcaagtcaaagggctttggcgaggcagccgcaggggtgttatgcatgttttataattagcgagtagcagagaggggcggagtgtacgccgtaagctaaaaaataaacagtgggtgcggtcaatgatgccacgaaaaatcaaaatggcatttcaacttgcatctcacgctgctgaccttagctgaaactgacttgctgaacttcagcaaaattcagctcaatgaagaagaaatgtgctgtatctctaaattctgatatcagaaagacgagtttacttgcaaggtacagcagaaagcgcaagactttttgaaacgtttcagcgctatcttgttttaacaaacggagcaggctagcgcattttttctcattaaagctgaaacgattcaagttcagcaggagtggagaaccatgttccagttatctgttcaggatatccacccgggcgctcaggccggggataaagaagaggctattcgccaggttgccgctgcgcttgtgcaggcgggtaacgtcgcggacggctatgtcaacggcatgctggcccgcgagcagcagacttcaaccttcctcggcaatggcattgccattccgcacggtaccaccgacacccgcgatcaggtgctgaaaaccggcgttaaggtgtatcagttcccgcagggcgtgctctggggcgacggtcaggtggcctatgtggccatcggtatcgcggccagcagcgatgaacatttaggtctgctgcgtcagctgacgcatgtcctgagcgatgacgcggtggctgaacagcttaaatccgccgccaccgcggaagagctgcgcgccttgctgatgggcgaaaaacagagtgaagcgctgaaactggataatgaaacgctgacgctggatgtggttgcttccgatctggtgacgctgcaggcgctgaacgcgggtcgtctgaaagaggccggcgcggcggatgccacctttgtgacgcgcgtgattaacgataagccgttgaatctgggtcagggcatctggctgaacgacagtgctgaaggcaacctgcgcagtgcgattgccgtgagccgtgctgccacggcgtttgaggtagaaggcgagcgcgcagccatgctggtgaccgtcgcgatggctgatgaacagccggtttccgtgctgaagcgtcttggcgatctgctgctgaacaacaatgctgaaaaactgctgaacgctgatgcgtccaccgtgctggcactgctgaccagtgatgatgcgctgacggatgacgtgctaaccgcggagttcgtggtgcgtaacgaacacggcctgcatgcccgtccgggtaccatgctggtgaataccattaaacaattcgagagtgagattaccgtggcgaatcttgacggcacgggcaaaccggccaacggccgtagtctgatgaaagtggtcgcgctgggcgtgaagaaaggccaccgtctgcgtttcaccgcgcagggtgccgatgctgaacaggcgctgaaagcgattggcgatgccatcgcggcgggtctgggggagggcgcataatgagcagacgtgttgcgactattacgctgaacccggcttatgacctggtggggttttgcccggaaattgagcgcggcgaagttaacctcgtgcgtaccaccggcctgcatgctgcgggcaaagggattaacgtcgcgaaagtgctcaaggatctcggtattgatgtcaccgtgggcggattcctcggcaaagacaaccaggatggtttccagcagctgttcagcgagctgggcattgccaaccgtttccaggttgttcagggccgtacccgtatcaacgttaagctgacggagaaagacggtgaagtgaccgatctgaacttctctggcttcgaagtgacgccgtcagactgggaacgctttgtcaacgactcgctgacctggctgggccagttcgacatggtgtgcgtcagcggcagcctgccgtccggcgtcagcccggaagcgtttaccgactggatgacgcgcctgcgcagccagtgcccatgcattatttttgacagcagccgtgacgcgctggtcgcgggcctgaaagcctcgccgtggctggtgaagccgaatcgccgcgaactggagatctgggcgggccgtaagctgccagaattaaaagatgtgattgacgctgcccatgcgctgcgcgagcagggtatcgctcacgtggtgatctcactgggtgcagaaggcgcgttgtgggttaacgcgtctggcgaatggatcgccaaaccgccgtcaatggaggttgtgagtaccgttggcgcaggggattccatggttggcggactgatttatggtctgctgatgcgggaatccagtgaacatactttacgtcttgccactgccgttgctgccctggccgtcagccagagcaatgtcggtattaccgatcgtacccagttagccgcgatgatggcgcgcgttgacttaaaaccttttaactaacagcaggagaggaataatgaaaacgctgctgatcattgactccggtctcggacaggcacgcgcctatatggcgaagaccttgctgggagcggcggcgaacaaagcacatctcgagatgactgataacccgggcgatgccgaactggccattgtcctgggcgacaacatcccggctgacagtgcgctgaacggcaaaaaagtgtggctgggcgatattaatcgcgcggtggcacatccggaactgttcctgagcgaagcgaaaggccacgcgtctgtctacagcgcgcctgtcgcgacggcaccggctgcggccacgggcccgaaacgcattgtggcggtgacggcctgcccgacgggggtggctcacacctttatggcggctgaagccattgaaaccgaagcgaaaaaacgcggctggtgggtaaaagttgaaacgcgcggctccgtcggtgccggcaatgccatcaccccagaggaagtggctgaggccgatctggtgattgtggcggcagatatcgaagtggacctggcgaaatttgccggtaagccaatgtaccgcacctccaccggcctggcgctgaaaaagaccgcgcaggagtttgataaagcgctggtggaagcgaagccgtatcaggcaaccggcgcgcgtcagaccgcgacggaagggaagaaagagtccgcaggcgcctatcgtcacctgctgaccggcgtgtcttacatgctgccgatggtggtcgcgggcggtctgtgtatcgcgctctcgttcgcgtttggtatcaccgcgtttaaagaacaaggtaccctggcggctgcgctgatgcagatcggcgggggctcagccttcgccctgatggtgccggtactggcgggctttattgccttctccattgctgaccgcccgggtctgaccccgggtcttatcggcggtatgttggccttgagcaccggttctggctttatcggcggtatcatcgcgggcttcctcgccggttacgtcgcgaagctgattagctcgaagctgaagctgccgcagagtatggaagcgctgaagccgatcctgatcatcccgctgatttccagcctggtggtcggcctggcgatgatttacctgattggtaagccggttgcaggcatcctggcgggtctgacccactggctgcagaccatgggcaccgcgaacgcggttctgctgggtgcaatcctcggcggcatgatgtgtaccgacatgggtggtccggtgaacaaagcggcgtacgcctttggtgtgggcctgctgagtacccagacctacgcgccaatggcggccatcatggcggcaggcatggtgcctccgctggcgctcggcctggcgacgattattgcccgtcgtaagttcgataaagcgcagcaggaaggcggtaaagccgcgctggtgctgggtctgtgcttcatcaccgaaggcgcgattccgttcgcggcgcgtgacccaatgcgtgtgctgccgtgctgtatcgcaggtggtgcggtaacgggtgcaatctccatggcgattggcgcaaaactgatggcaccacacggcggtctgttcgtgctgctgatccctggcgccatcaccccggtgctgggctacctgctggcgattgttgccggtacgctggtggcgggcctctcttacgcggtgctgaaacgtccggaagcggaagttgtggcgaaagcagcgtaagcggtaagccataaaaaagccgggtgctaatgcaacccggctttttttatgccgcctgttcagcggtttgctgtgacttcagccaggcaatctcttctgcccagatgtccggattgatggtttccagcaccatcggaataccgtcgaagcgagcgtcctgcatgataaagcggaacgcatcgtggccaatgttgccttcgcccaggctgtgatggcggtcaacgcggctgccaaaggcgcttttcgcatcgtttaagtgcattccacgcaggtatttaaagcccacaatgcgctcgaactcatcaaacgtgttttttgttgcctcggtggtgcgcaggtcataaccggcggcaaacgcgtggcaggtatcaatgcacacgccgacgcgggatttgtcctccacgccgtcgataatcgccgccagatgttcgaacttaaagccgaggttgctgccctgaccagcggtgttctcaatcaccgccgtcacgcctttggttttatccagagtgatgttaatggactcggcaatgcgcgccaggcaggcatgttcgtcgatctgcatcagatggctgcccggatggaagttcagcagcgtcagcccgagctgttcgcagcgctgcacttcatccagaaacgcctcgcgggatttttccagcgcttcttcaaccgggtgaccgaggttgatcaggtagctgtcgtgggggaggatctggccgggcccgtagcggtatttctcacaggcggctttgaaatcatcaatcacctcagcggtgagcggtgcggcgcgccactggcgctgatttttggtgaacagggcgaaagcggtcgcctcaatttcggcggcgcgaatggcggcattcgcaaggccacctgcagcgctaacgtgcgctccaacatatttcataaagggactcctgttaacccgaaatgcctatgatagcgggttaacaggagagggatgtagtggtttatgccatcaggctatggaccgcgaggttaatcgcgccaccgccgacaatcagccagatgaagagtaccagcgccatcagcagcggtttcgcaccggcttttttcagcgcgctgacgtgcgtggtcacccccagggccgccatggccatcgccagcagtacggtatccagcgtcaccagcatatccaccaccgctttcggcagcaggtggaaggagttaaagatagcgaccacgatgaacaggatcgcaaaccacggaatggtgattttacttttctcgctgccgcccgccggagccagctgtttaacccgtgcggccaggaaaatcaggaacggcgccagcatcatcacgcgcagcatttttgcaatcaccgccgcgttttcggcgtccgggttaatggcatgccctgctgcgaccacctgggccacttcgtgcatggtcgagccgatatagatgccgtaggtttccgggctaaaccaatgggcgaccagcggatacatggccgggtagaggaaaatcgccagcgtaccgaagatcaccaccgtcgcgacggcaaccgttaccttgctggcttcggctttcacgaccggctccgttgccagcaccgccgctgcgccacagatactgctcccggcaccgatcagccagctggtttgcctgtccaggccaaacactttctgaccgataaagcaggccagtaaaaaggtgctggtcagggtcagaacgtcgatggcgatcccgctcgcacccacatccgcaatctgcgaaaaggtgagacgaaagccataaagaatgatcccaagacgcagtagatgctgcttggcaaagatcacgccgccgtcgcaggatttccagatatgtggataaacggtgttacccacgaccatgccgagcaaaatggcgagcgtcagcgcgctgaaacctgcgcctgcgatggctgggatgctgccgccccatagcgctacggcggtcactgcggcgctgagcgcaagacccggcacgaagtgccacactgtacgatgatgttgtaaggtgatttctgacataaccttctcctttgtctggctaaaggttacggcggtctggcttaaaaataaaattgattatatacttataatcaatctatataagtggtaagtaaccatgcacattactttgcgtcagctggaagtgtttgccgaggtgctgaaaagcggctcgacgacccaggcgtcacaaatgctggcgctctcgcagtctgcggtcagcgcggcgttgaccgatcttgaaggacagctgggcgttcagcttttcgacagggtagggaagcgtctggtggtcaacgaacacggtcgtcttctttatccacgcgcgctggcgctgctggagcaggctatcgaaatcgaacagctgttccgcgaagataacggcgcgatccgcgtctacgccagcagcaccatcggcaattacatcctgccggaggtgatcgcccgctatcgtcgggatttcccgaccctgccgctggagatgagcgtgggcaatagccaggacgtcatcaacgcggtgatcgacttccgcgtggatatcggcctcatcgaggggccctgccacaacgtcgatatcattgccgagccctggctggaagacgagctggtggtgtttgcgtccccggcctcgtcgttattgcagggcgaggtgacgctggagcggctggcgcaggcgcagtggatcctgcgcgagcagggctccggcacgcgtgaaattgtcgattatctgctgctttcccatctgccgcatttccagctggggatggaattggggaactcagaggcgattaagcacgcggtgcgccacgggttgggtatcagctgtctttcccggcgcgttattgccgaacagctggaaaccggatcgctggcggagattcccgttccgcttccgaaactggtgcgcacgctgtggtgcattcatcatcgccagaaacacctttccagctccctgcagcgttttctgcgctattgcgaaatctgacagcgtccctcaccccaaaggggagagggaaaaattatgctttacttataatcctggccgcgtcatgaagctctcttataactgagtatttctgccggaaggaacgcggatcgtctgctacaatcgcgcctcatttattaaatggacagcattttcatatggtttcagaaattaaaaccacagaagcgcccacgctacgtcgtgaactcaaggcgcgtcacctgacgatgatcgccattggcggctccatcggtacaggtcttttcgttgcctctggcgcaacgatttcggcagccggcccgggtggggcacttttctcttatatcctgattggcctgatggtgtacttcctgatgaccagtctcggcgaactggccgcgtacatgccggtatccggttcgttctcgacctatggtcaaaaatacgttgaagaaggcttcggcttcgcgctgggctggaactactggtacaactgggcggtcaccatcgccgttgaccttgtcgccgcacagctggtgatgaactggtggttcccggatacgccgggctggatctggagcgccctgttcctggccgtcatcttcctgctgaactacatctccgtgcgcggtttcggcgaagcggaatactggttctctttgatcaaagtggcaaccgtcatcatctttatcgtcgtcggtgtggcgatgatcgttggtattttcaaaggcgctgaacctgcgggctggagtaactggacaataggcgatgcgccgtttgccggtggactgtcggcaatgattggcgtggcaatgattgtcggcttctccttccagggaaccgagctgattggcattgctgccggtgagtcagaaaacccggagaagaatattccgcgcgcggttcgtcaggtcttctggcgtatcctgctgttctatgtgttcgcgatcctgattatcagcctgatcattccgtacaccgatccaagcctgctgcgtaatgacgtcaaagacattagcgtcagcccgttcacgctggtcttccagcatgccggcctgctttcagccgcagcggtgatgaacgccgttatcctgaccgccgtactttctgccggtaattccggaatgtacgcgtccacccgtatgctctacacgctggcatgcgacggtaaagcgccgcgtattttcgcgaaactgtcccgtggcggcgtgccgcgcaacgcactgtacgccacaacggtgattgccggcctgtgcttcctgacctctatgtttggcaaccagacggtgtacctgtggctgcttaacacctccgggatgacgggctttattgcctggctggggattgccattagccactatcgtttccgccgtggctacgtcaaacagggttatgacgttaaccagctgccgtatcgctcagggttcttcccactgggtcccattttcgccttcattctgtgcctgattattacgctgggacagaactatgaagcgttcctggcggacaccattgactggggcgccgtcacggcaacctacattggtattccgctgttcctcgtcatctggtttggttacaagctgacgaaaggaacacacttcgttcgctacagtgaaatggaattcccggaacgatttaaacaataatcgcacttcctctctcttagcccgctcgtttgagcgggcttttttattcccgccccctgtaacaaagatatatttcttaacaatttaattgataataattatcgtttgctttatcgttatcaaaaataagcgtgtcaccgacccaccggagatgtgggcggcaaggaagacgctgtgagcaatgatgatttgattgagttgtatttacctcatggagatatggaatgtttaggttgaatcccttcgtcaggggaggactttgtgcgtccgcaatgtccctggccctgcctgttatcgcagcggaatccggcgacacaatggttgttacggcctccgcgaccgagcaaaacctgaaagacgcaccggcaagcatcagcgtgattacccaggaagatttgcagcgcaaacccgttcaaaatctgaaagatgtgttacgggatgtgccgggcgtgcagctcacaagcgaaggggacaaccgtaaaggggtaagtattcgcgggctggacagcagctacacgctgatcctgatcgacggcaagcgcgtcaattcccgtaacgcagtgttccgccataatgatttcgacctcaactgggtgccggttgacgccatcgaacgaatcgaagtcgtgcgcgggccgatgtcctcgctttatggctccgatgcgctgggcggcgtggtgaacattatcaccaaaaaaatcggccagaaatggacgggcaccctgagcgctgattccacaattcaggaacatcgcgatcgtggtgatacgtacgacggccagttctataccagcggtccgctggtggacggcctgctggggctgaaagcctacggtagcctcgcaaagcgtgagaaagacggtcagcagaagtcctctaccacggcgagcggtgaaacaccgcgcattgaaggcttcaccagccgcgatgcgaatgtggagttcgcctggacgccgtctgaaaatcacgactttacggcgggctacggtttcgaccgtcaggatcgtgactcggattccctcgacaaaaaccgccttgagcgtcagaactactctctcagccacaacggccgctggggcgtcggcaacagcgagctgaaggtttacggcgagaaggtggataacaaaaacccgggcaacagcaatccgatcacctccgagagcaacgcggtagacgggaaatacgtgctgccgctgggcgacatcaaccagctgatgaccttcggcggcgaatggcgtcacgataagctgaaggatccggtcaacctgacgggcggctccggcagcagtacgtcgacaagccagtatgccctgttcctggaggacgagtggcgtatttttgaacctctggcgctgaccaccggcatccgtatggacgaccatgatacctacggcgaccactggagcccgcgcgcctatctggtctacaacgcgaccgataccgtcacggtgaaagggggctgggcgaccgcgtttaaagcgccgtcactgctgcagctgagcccggactgggtcaccggctcgtgccgcggtgcctgtgagattgtcggtaacccggatctgaagccggaaaccagcgagagcttcgaattcggcctgtactacagcggggaagagggctggttagagggcgtgcaggccagcgtgaccaccttccagaataacgtcgatgaccgcatcagcatcagccgtacggccaatgcgaagcaggcgcagagctaccctaactacgttggcctgaatgcggacggtgagccgatattccgctactacaacgtcaacaaggcgcgcatccgcggggtggagaccgagctgaaattcccgctggcggacgactggaaagtgacgctgaactacacctacaacgacggtcgtgatatcagcaacggcggcaacaaaccgctgtccgatctgccgttccacaccgccaacgggaccgttgactggaaggcgacgcaggactggtcgttctatgttcagggcaactacaccggtgagaaacgcgcgctgaccagcagcgacccaacgccgggtggctatgttatctggaataccggcgccgcgtggcaggcgacgaaaagcgtgaagctgcgcgcgggcgtgcagaacctgctggacaaagatctgagccgcgacgattacagctacacggaagatggccgtcgctactttgtcggcgtggattataagttctgatgtagccatgtgccgggtggcggctgcgccttacccggcctacataagggcacaggcccgtaggcccggtaagcgaagcgccaccgggcaaaacaggcggtgcttatgcaaataaatgctccgcatggaagcggagatgatcctcaataaaggacgcgatgaagtaatagctgtgatcgtatcccggctgaatgcgcagcgtcagcggccagtctttctggcgtgccgcttctgccagtaccgcaggctgcagctgtccggcgaggaactggtccgcatcaccctgatcgataagggtaggaatggcttcttcagctttgctggccagcatcagcgcgcagctgtcccatgcctgccatttttccacatcctcacccagatagtgtgtgaaggctttctgcccccacggcacctgcgttgggttcacaattggcgcaaatgccgacacgctgacgtatttccccggatttttcagcgccatgatgagtgccccgtgtccgcccattgagtggccgctgatcgcgcagcgctcgccaaccgcaaactgcgactgcaccagcgcaggaagttcatcgcgaaggtaatcatacatgcggtagtggcgcgcccagggctgctcggtcgcattgagataaaacccggcgcctttgcccaggtcgtatccggcatcgtcggccacatcgtcgccacgcgggctggtgtctggcatcaccagcgcaatgcccagctcggcggcaatacgctgcgcgcccgctttggtggtgaagttttcgtcgttacaggtcaggccggaaagccagaacaaaaccggcgggttttccgtcggcggcaggaaaatgctgaacgtcattgcacagttcagagaggtggagtcgtgccgccagcgctgatgtcgaccttcaaaacaacggtgctcttcgagcagttccatgcagggctccttaatgagaatgcgtattcataaaacccataatacagccttttcattgacctgtgagtaactttcactttcgccaggcggcgagatgctgcatcataaatttacttttctttaacaattggagcggtcatggcgctgcgtattgcgctcagtgggtttgtcgttctggtggtggcgatggggatagggcgctttgcctttacgcctcaggtaccgctgatgattgctgccggacagcttacgctgaccagcgcgggtctggtggcggcgatgaattatctgggctatctggtgggtgcgtgggatgcgatgcgtgcgcaccgcttcgttgaaacgcgcctctggctgggcatcaccggcgcggtggcgctgacgctgctctccgcggcagcggataacgccgtcgtgcacggcctgctgcgcttcgtgattggctgcatgagcggctggtcgatggtactcattgccgcctggaccaacgaacggctggggcagctgggtaaaccgggcctgagcgctgcggtgtttgccggaccgggggcgggcattgccctgagcgggctgctcgccgtctatattcaggcgaagtccctgtcggccggggcggcatggcaaatctacggcgtactggcgctggtgctgattgccctggtggcgcgctacctgccgcgatccgggcagctccatcgacccggcaccgcgccggagccgctggtgctgacggcggatttaacgcgtctggtctggagctacagcctggccgggtttggctatatcctcccggcgaccttcctgtcgcaaatggcggccgtgcgttttcccggcagcctgtttgcccagtttgtctggccgatttttggtctcgccgccgtggtggggattgcgctcagtattctgttacgccatacctcaacggctaaccgcaggctggcgatcgtactgtggttacagggcgcaggcgtgctggcggcctggctgctgccggggattggcggtttgctgacgggcgggctgctggtgggcggcggctttttgtgtgccgtgcagctctctcttttatacggccgcgagctggcgccaaaccacacgcgttatatggctggcctgctcaccaccgggtatgcgattgggcagttgattggtccggtcacctcggcgttatcaacctggcttacccaccggctggagcccgcgctggggctggcgggcattgcgctgtttgttggaggagcgcttgtctggaatcgtcacgctgaaaggcaacagcaatcgcaataattatcgtcgtgaatactggattatgtgcgccgcctaacgcacaatgaacgcatacttttgccacaacgagggcaaaagacgccacacctgcaggagaacaaaatgtcatcactcagtaaagaagctgccctggtccacgaagccctggttgcgcgcggtcttgaaacgccactgcgtccgcccgtacaggatttggacaatgaaacccgcaagcgtctgattgccggtcacatgaccgacatcatggagctgctgaatctcgatctgagtgacgacagtctgatggagacgccgcaccgcatcgcgaaaatgtacgtcgacgaaattttctccggcctggattacgccaacttcccgaaaatcaccgtcattgaaaacaagatgaaagtggatgagatggtgacggtccgcgatatcacgctgaccagcacctgcgaacaccatttcgtgaccatcgacggtaaagcgaccgtggcgtatatccccaaagatacggtgattggcctgtcgaagatcaaccgcatcgtgcagttcttcgctcagcgtccgcaggtgcaggagcgcctgacccagcagatcctgaccgcgctgcaaacgctgctgggcaccaataacgtggccgtctctatcgacgcggttcactactgcgtgaaagcgcgcggcgtgcgcgatgccaccagtgcgaccactacaacctcgctgggcggtctgtttaaatcgagccagaatacccgccaggagttcctgcgcgccgtacgtcaccacaactaagtcttacagggcagggaccatggagcgaaacgtcacgctcgattttgttcgcggcgtcgccattctcggtatcctgctgcttaatatcaccgccttcggtttgccgaaggcggcgtatctcaatcccgcgtggtatggcgacattacccgcagtgatgcctggacctgggcaatcctcgatctctttgcgcaggtcaaattcctcacgctctttgccctgctgtttggcgcaggcctgcagcttctcctcaaacgcggcacgcgctggatccagtcgcgcctgacgctgctggttatcctcggctttatccatggcctgttcttctgggacggcgatattcttctcgcgtatgggttagtcgggctcatctgctggcgcctcattcgcgatgcgcacagcgttaaaagcctgttcaacaccggcgtgatgctctatgtcatggggcttggggtactgctgctgctggggatgatctccggggagacgacgaatcgtgcctggatcccggatgccgctaacctgcagtacgaacagttctggaagctgaagggcggtacggaagcgataagcaaccgcgcggatatgctgggggataacctcctcgcgctgggcgcgcaatacggctggcagctggcgggcatgatgctgatgggcgcgtcactgatgcgcaccggctggctgaaaggggaattcagcctgcgtcactatcgtcgcacaggcgccggtctggtgctgctcggcgtgctgattaacctcccggcggtgatggtgcagtggcatatccactgggattaccgctggtgcgcgttcctgctccaggtgccgcgtgaactgagcgcgccgtttcagaccatcggctacgcggcgctgatctacggcttctggccctcgctttctcgtctgtggatggtcagcgctatcgcctgcgtgggccgcatggcgttgagcaattacctcctgcaaacgctaatctgcaccacgcttttctatcgcgttggcctgtttatgaaattcgaccgccttacgctgctggcgtttgttattccggtctgggcggtaaacctggcgttttctgttctctggctacgctatttccgccagggaccgctggagtgggtatggcgtcaattaaccgcacgtgcttcagggatatcattgaaaaatacatccagataacgatctggatcacaatcattaacaaaacggatgtaagcgttttcatgactgtgagcttcttcacgtagtcccctttctctcgctgccaaaatagccaccttgctaaacacagggggtgtctgtgagttgctgcaatcctttgaaggatggtgaatatgatcaccattcgtgacgtcgcccgtcaggcgggcgtttctgtggctaccgtctcacgcgtgctgaacaatagcgcgctggtcagccctgaaacccgagaaaccgtaatgaaggccgtgacccagctcgggtaccggccaaatgccaatgcccaggcgcttgcgacgcaggtcagcgacaccatcggcgtggtggtgatggatgtctcggatgcctttttcggcgcactggtgaaagcggtcgatatggtcgcccagcagcatgagaaatatgtcctgataggcaatagctatcatgaggcggaaaaagaacgccatgccattgaagtgctgatccgccagcgctgtaacgctttgattgtccactcaaaagccttgagcgatgaagagctaaccggattgatggagcagatcccgggcatggtgctgatcaaccgcatcgtccccggctatgcccaccgctgcgtcgggctggataacgtcagcggcgccatgatggccacgaaaatgctcatcaataacgggcatcagcggatcggttatctggcctccagccacgcgattgaagatgacgaactgcggcgcgaggggtggcaaaacgccctgaaagagcatggcattacgccatccgagagctgggtgggaaccggcacgccggacatgcagggcggtgaagcggcgatggtagagctgctgggccgcaatctgcagctgtctgcggtgtttgcctataacgatagcatggcggcaggcgccctgacggcgctgaaggataacggcattgcggtgccacagcatttatcactcattggtttcgatgatatcccgattgcccgttacaccgacccgcagctgacaacggtgcgctacccgattgcctctatggcgaaactggcgactgagctggcgttacagggggcagcaggcgtgctggatccgggggcaacacactgtttcatgccgactttagtgcgtcgccactccgtcgcggcccggcaaattgtggttccgatcactaactgattacatgtggtgatgtaaccgttttcaatctgtgagtaaattcacagtatcttaacaaggcgctgactatgatgtcagcgttttaggggctgaaacgctatgtaacagtgattattcactttcactatagccaatgtgccgcaaacaacgaataaaacgcatttctggagcgttaccgaacacggaagagagaaattttataagtgaacctcggctgtcagtaacgttttattaacatctgcccgccgctcgttattcacaagaactaccctgcataaaaaaaaccggagataccatgaataagaaggtgttgaccctgtctgctgtaatggcaagcatgctttttggtgcagcagcgcacgctgcggatacccgtattggtgtgaccatctataaatacgacgacaacttcatgtctgttgtgcgtaaagcgattgagaaagatgcgaaagcagcgccagacgttcagctgctgatgaacgactcccagaatgaccagtccaaacagaacgaccagatcgacgttctgctggcgaaaggcgtgaaagccctcgccatcaacctggttgacccggctgcagcaggcacggttattgaaaaggcgcgcggccagaacgtgccgatcgtcttcttcaacaaagaaccttcccgtaaggcgctggatagctacgacaaagcgtattacgtcggtaccgactccaaagagtccggtattattcagggcgatctgatcgcgaaacactgggcggcgaacccgaactgggacctgaacaaagacggtcagattcagttcgtgctgctgaaaggcgaacctggccacccggatgctgaagcgcgtaccacctacgttatcaaagagctgaacgacaagggcctgaaaacccagcagctggcgttagataccgcgatgtgggataccgctcaggcgaaagataagatggacgcgtggctgtccggccctaacgccaacaaaatcgaagtggttatcgccaacaacgatgcgatggcaatgggtgcggtagaagcgctgaaagcacacaacaaatcctctatcccggtattcggcgtagatgcgctgccagaagcgctggcgctggttaaatccggtgcgatggccggtaccgtgctgaacgatgccaacaaccaggcgaaagccaccttcgacctggcgaaaaacctggccgatggcaaaggtgcggcagatggcaccaactggaaaattgacaacaaaatcgttcgcgtaccttacgtgggcgtagaccagtccaacctggctgagtttatcggtaaataaaagagttaacttgtcttcactgggcgcaacgagttgcgcccttttataacgcgatatgcgaggccaacaaggtataattatggtcagcacaacaactcagtcatccggtgaatacctgttggaaatgagcggtatcaacaagtcatttcccggcgttaaggcactcgataatgttaatttaaaagtgcgtcctcactctattcatgccttaatgggggagaacggtgcgggtaaatcaacattattaaaatgtctttttgggatctatcaaaaagattctggcagtattctttttcaggggaaagagatcgatttccattcagcgaaagaagcactggaaaacggtatctcgatggttcaccaggaattaaacctggtgctgcagcgttcagtcatggataacatgtggttggggcgttatcccaccaaaggtgtttttgtcgatcaggacaaaatgtatcgcgacaccaaggcgattttcgacgagctggatattgatatcgatccgcgcgcccgcgtgggaacattatccgtctcccagatgcagatgatcgaaattgccaaagcgttctcctatgatgcgaaaattgtcatcatggacgaaccgacatcctcattaacggaaaaagaggttaaccacctttttaccattattcgtaagctgaaagatcgcggctgcggcattgtgtacatctcccacaaaatggaagagatcttccagctgtgcgatgagatcaccatcctgcgcgacggccagtggattgccacgcagccgctggaagggctggacatggacaagatcatcgccatgatggtcggccgttccctgaaccagcgcttcccggacaaagaaaacaagccgggtgaagtcatcctggaagtgcgcaacctgacctcgttacgtcagccgtctatccgcgatgtctccttcgacctgcataagggtgaaatcctgggaattgccgggctggtgggggcaaagcgtaccgacatcgtggaaaccctgtttggcattcgtgagaaagccgaaggcaccattacgctgcacggtaagaaaatcaataaccacaacgccaacgaagccattaataatggttttgcgctggtgacggaagagcgtcgttcgaccggtatttatgcttatctggatattaactttaactcgttaatttctaacattcgcaattacaaaaacaaagtcgggctgctggataattcccgcatgaaaagcgatacccagtgggtgattgactccatgcgcgtgaaaacgccaggccaccgcacccagattggttcgctgtcaggcggtaaccagcagaaagtgattattggccgttggttattaacgcagcccgaaatcctgatgctggatgagccgacccgcggtattgacgtcggcgcgaagtttgaaatttatcaactgattgccgagctggcgaaaaagaataaagggatcattattatttcttccgaaatgccggaactgttagggatcacggaccgtattctggttatgagcaatggtctcgtcgccggtattgttgacaccaaaacgacaacgcaaaatgaaattttgcgtcttgcgtctttgcacctttaagatcaggggctcctcatgagtgcgttaaataaaaaaagttttctcacttacctgaaagaaggcggtatttacgttgttcttttagtcttgctggcaatcatcattttccaggaccctacgttcttaagcctgctcaacctgagtaacattctgacccagtcctccgtgcgtattatcattgcgctgggcgtggcgggtctgatcgtgacccaggggacggatctttctgccggtcgccaggtaggtctggcggcggttatcgcggcaaccctgctgcagtcgatggaaaacgccaacaaggtcttcccggaaatggccaccatgccgattttcgtggtgatcctgattgtctgcgccattggtgcggtgattggtctgatcaacggtattatcatcgcctacctgaacgtgacgccatttatcaccaccctgggcacgatgatcatcgtttacggtatcaactccctgtactacgacttcgtcggtgcttcgcccatctcgggctttgacagcggcttctcgacctttacgcaagggtttatcgcgctgggcagcttccgcctgtcgtatatcaccttctatgcgctgattgcggtcgcctttgtctggatcctgtggaacaaaacgcgctttggcaaaaacatcttcgctatcggcggtaacccggaagcggcgaaagtgtccggcgtaaacgtcgccctgaacctgcttatcatctatgccctgtccggcgtgttctacgccttcggcgggatgctggaagcgggccgcatcggctctgcaacgaacaaccttggcttcatgtacgaactggatgcgatcgcagcctgcgtggtgggcggcgtctccttcagcggcggtgtgggtaccgtactcggcgtggtgacgggtgtgatcatcttcaccgtcatcaactacgggttgacctacataggcgtgaacccgtactggcagtacatcatcaagggcgccatcattatcttcgcggttgcgctggattcactgaagtacgcccgtaagaagtaatcgtccctcgcaatacccggcccgctcaccgagcgggctttttttatgccctatgccagatgggactcctcctgcgtcacaatccgctcaaaccagtcgagttcagaaagcttgcaggcgacccactgttcggaaaaggcgtcgcccaggctgtcggtgagatactgacagcgggcaaagccctcaatcgcctcctgctggaacagcggcagttcgggttggtcgtgctgcggttcagggagatccccctcgtcgatatgttccagcccgtacagcatgccggtcaggatagtggccaccaccagatacggattcgcatcggccccggccagccggtactcgatacgacggttgctctcatccgagcagggaatacgcaaggcggcggagcgggtgttatagccccaggagttaaagacgggttccgtcaggtttttacgcaggcgacgaaacgcgttgacccccggcgcaagaatggcgacggaggcgggcatcagtgccagctggcccgcgatgcacaagcgcatcatgctgctcagcgcgttgaccggggaggcaaaaacgttttcgccacggctgttgttcaagctgaaatggatgtgcaaaccgctgccggaaagctcgctgaacggcttagccataaagttggcctgaagaccatgcttttcagcgacatagcgggtcaggcggcgcagggccagcacgttatcacagacctcaacgacgcgctggctgtgcttcaggtttaattcgtactgtccggactcggcttccgctacgacccctgacagcgggatgcgctgcaggtgcgccagctgttccagctcgtcaaacagcgccgcatgcgccgacgaggtatccatatgaaaacagccctgattttgcggattgcgttcgccctgtcccgtcaggtaaaactcaatttccggggcaatcaccgggaagaggccgtgctggtggaagcgggccacgacgttctgcagtatcgcgcgcggctcaagcgggcaggggttaccgtcgctgtctttcatcgtcagcaggatctgcgcggtgtgatccggatcctgcggacaggggcgtagagaaccggcgaccgggacgcacagccggtcgggttcatcataaagcggggcggcgatgtttcccttctggtccatggagtagacggaaagcggaaaataacagcctttttccaggctcagcatgctctctaccgagaggcgcttgccgcgcatcgtgccgttgatatcgttcaggtaaacgtcaacatgtttcgtttgcgggtaacgttccagataatcggccacttccacggcaacgttgtgctgcagggcgtcaattttttcatccagccagaggccagaattaagtgcgccagggagtgataagccgggaaagttaaagtacgggcggagacttttgaggaaaaacgcattcattatcgagttcatagtaattcttcaatgaagccgtagcggcagtgaactcagcttaaaagagccgacgtaaaggggagataaaaagcgtcaggcccggcgtaaagaaagtataaaggcggctctgttatttctcttttttctgcatatccagcagctgctcgggcgtgacggccggataaccctgcgcgtcttccggcacttcgtgcatcgccggaatcggcaccagcgggcctaaaaagcgcggttcgcgcttaaagatatacagatcggccagggcaccaaagcgggcgccgaactcgcggacgcgcacgctcagcatatcttttggcgacggcaccgcgtagcactgcgcctgaatgcccatgtgcagggcgataaacagcgcgcgctcgcagtggaagcgctgggtgatgatgatgaagtcgttggtgtcgaagactttgcgcgtgcggacgatggagtccagggtgcggaagcccgcgtagtcgagcacgatatcggcaggatccacgcccgcggcaatcaggtccttacgcatcgtcaccggttcgttatagctttgcagggcgttatcgccgctcagcagcaggtagttcaccttgccgctgttgtaggcgttcagcgcgccctgaatgcggtaacggtaatactggttgatgacgccggtgcggtaatacttggcggtgccgagcaccacgccaacctgacgatagggcaggtcctgcaggtcgtcaaagatatagggggcggttttccagctcatccaccggtcgaggccgagcacgatcaacagcagtatgccgaccaggacagacaggctgtaaaaaacgcgctttaacatgcagatggctcgtaccgaaggtgaaatttaactcaggctactttacccgcctggttagcgcaagaaacagcgactcaactgaggggtttttcaacaaactggcgggcatttctgcccgccggaagggttacgccagcagcacgcggtcgatcgtcgtacagcccagcgctttaagcgttgcggcagtggcatcccactgaatcagcggcgcatcggcaatttcagccagaatggcgcgctgaatgtcaggataatcatagccgttcaggctcagcaggttgagtgcgccctgcagcggcggcagcgttgggttaaacgcggcgttttccgcatagctgccggtgaagattcggccatcgcggcactgcagcgccacgccgctcggggacttgctgtacggcgtgtggctcttgttggcggcggtaatcgccgcctggctcaggtcatcgccggacagggcgaaaccgtggtcctgctcgtccatcagcagggttttgatctccagatctttcgggccaaacgcgtcaggcaggtaatccgccagcgtgtgcggcgcgcgacccggcaggttgatgcgcagctgcagcccgctgttcagctcgttcataaactgacggcagtggccgcagggggtgtagttcacggtaatggcgctcagcgctttttcaccgcgcagccaggcgtggctgatggcgctctgctcggcgtgaacggtttgctgcatggttgcgcccaggaactccatgttgccgccgaagtaccaggtgccgctgacgccgcgcgcaatggccccgacgttgaagtgggagagatcggcccgcgcgcaggcggcagccagaggaagcagtgcgaaagccagcgcgtcttcgtccagtcccgttgcctgtttcagcatcgtgacctgctccggggtcagcagggcggggaagtgcgcatctgccagaacgggagcaagggctgactgcaaattctctgcaagctgggcgaaagcagcttgaaaacgtgggtgcatggcgtttgcctcataaaggttaatggatcggtagtttacggagccgtcagggctttatatgtgatccacttctcattatgtatgcaacttatgaaatcaaaatgaaatttgcgcgacgcatcgcaaattttagcccatcaccgccagaataagcgggaaaatgaacggggccagcagagaggtaataatcccgcagatcaccagcgccagggagctaaatgccccttcctgataatccagctccgcgcagcgggccgtgcccagcgcgtgcgaggcggtgcccatcgagagcccccgtgccgccttagtatgaatacgcatcgcgttcagcagggtgtggccaaacaccgcgccgagaataccgacgaaaatgacgcacatcgcgctgatggccggaataccgccgaggctgcccccaaccgccatcgcgataggcgtggtaaccgatttaggcagaatagaggcggcaatttgcggcgaggctcccatcaacagcgccaccgacgtaccggtgatcatcgccaccaggctacccacaaaacagatggtaatgatggatttccagcgggcgcggatctggtgcaactgctcgtataaaggaaaggcgagcgccacgacggcgggttgcagcaggtcgtttaagattttgctgccagcaaagtagcgttcgtaaggaatgccggtgagcagcaggaacggaataatcaccaccatcgccaccagcagggggttcagcaagggcattttgaaacgcgcggcaagtttacgtgcggcgaaaaagactgcaagggtgagcggcagggaccaccagatattgtccatcatttttttgttttctccccaatcacgttacgttcgccatgcaccagatgtgaactccagctcaccaccaggaaaaccaccagcgtactcaccgcgcaggaaacaacgatcgggccgaactgggctttgagcaaatcaaaatactgcatcaccccgacgccgataggcacgaaaagcagcgccatatagcgaatgaggacgaagcagccggggttgacccactttgcaggcaggatttgcagcgccagcagcacgaagaggatcagcatgccgataatgctgccgggaatggtgatgggcagcagcgacgcgatgaaaatcccggcatacaggcaggcgtaaatcaggacgaatgcgcgcagatattgccagataatgttcaatgatttgctcatggtgatagtccttgctgaaacgcattcatcatacaattaaacctaaaaatgtgccacggatcacatcatgaattttgagcataccagacattccggaatggaacgtccggtatcaccgcacagggcaggctacagtttagaggaaagggattgcgctggcgaagtaacgcgccagagaaggcatcagcgtcaggcggtcagtttatcgagaaaagaaaacagcacctggttcatttcgcgataatcatgcgagcggagtttttccgccgtttcgacaaaacggaattcacccgcgcggcgaaggtcattctgcgaatgctcaatcagcaactctaccacctccggcgtcagctccatatggcactggaaaccgtaaacccgttcgctgtattgcacgatctggcggggacagccctcgctgtaagccagaaccttagcctgcggcgtcaacccaggcatgtcgttatgccagtgaccgacgttcagcacgctgccaaagccctcaaacagcgggttcgccttgcctgcatctgtgagcctgacgggaaatttgccgatctctttttccgggctgtggcaaaacgcggcgcccagcgcttcgccgataagctgtgagcccagacaaacgcctatcaccgttttaccttcctctatcgcgcggctgatgagtgccttttccgcctgcgcatcaaaccaggggcattcctcacgcgtggtggcgggggactgcgggcctcccatgatgataagcaggtctgtgtgccccagttcctcaggtaacggatcgccctgatacactctggtatagctcagactgcagccgcgacttttcccccagatttcataggcgcctggcgcctcgaaatgttcatgaataataaaatggatgtgcattgcgtctctctctggttacgtgtacaagcagcatcataagaggaaggggggaatgtgaaatgccaaccgttatcgataaaacgccaattcacgacgatgccatcggatggtcaagaggggcaattcgctatacgcgcggcgaagtcgatccgcctcaccagcattcgcagggacaacttttgtttgccatcaaaggagtcatgctggtcgaaaccggcagcaaacgctgggtcataccgccgcagcgcgcgctgtggatccctccctttcaggagcatacctacagcgtgttatccgcaacggagcttcgcgcggtctggtttagcccggcactgatttcgcaatgcgaaccttttaagcggaaagacgaggttcacgtgattatggccacagcgttgttcaaagagctgattgccgggctgttcagcgcggaataccggccggcaagccagcgcagcatggccgttttgctgctcgacatcctcagcgagacgcagcagatttcagccgaactgccgatgcccgtggatgagcgcttacatcgcgtggcctgtgacatcattgccaacaatctctgggatctctctctggaaaggctggcggaacgggccgcgatgtctgaacgcacattttcacgcgcgtttatcaacgataccggctttagcttccgggcctggcgacagcgcgcaaggatttgtgcctcgctggatctcctcgccaacggatacccggttaagcaggtggcctggatgctggggttctccggcccggcggcatttgcggcggcgtttcgcgccattgttggggcaacgccgggtgactttctgcctgaacagaagcgcttcccagcgatatagagagcggctactatagcgcgtcttttttcacaggtactgctatgcgtgttttactggccccaatggaaggcgtgctcgactcccttgtgcgcgagcttctgaccgaggtgaacgactacgatctctgcgtgacggagtttttgcgcgtggtcgatatgctgttgccggtaaaatccttcttccggctttgccccgagctgcacaaccagagccggacctcttccggcacgctggtgcggattcagctcctcggccagtatccggaatggctggcggaaaacgccgcccgcgcggttgagctgggctcttacggggtggatctcaactgcggctgtccgtcgaagctggtgaacggcagcggcggcggggcgacgttgctgaaagatcctgagctgatttaccgcggcgcgaaagccatgcgcgaggccgtgcccgcgcatttgccggtgacggtaaaggtgcgcctggggtgggacagcgatgcccgacagttcgagatcgccgatgcggtgcagctggccggggccaccgagctggtggtgcatggccgcactaaagaagatggctacaaagccgatcgcataaactggcaggcgatcggtgagatccgcaaacggctctccattccggtgatcgccaacggcgaaatctgggactacgagagcgcgcaggcctgtctgcaggccaccggctgcgatgcggtaatgatcggccgcggcgcgctgaatgtgcctaacctcagccgggtggtgaaatataacgaaccgcgtatgccgtgggcagatgtcgtcacgctgctgcaaaaatacagccgtctggaaaagcagggcgacaccggtttgtatcacgtcgcgcgtattaagcagtggctgagttatttacgcaaagagtacgaggaagcgctggagttatttcaggagattcgtactttacagacgtcgactgatattgcgcgggtgattcagtccaaataataagcgttaaattgctcacacttttttaaaacagaaaacagttcaggttttcaacgtggcgcgacggtgttaaggtgccactgttttcaacgcaggattgtgactggttaacaggcaaaacctaagcgttccacagcattttcgctgtggggcgcttaggtttttttttgcctgtcatttacgcaggagagatatttggcttagcgctttttaatgatttttaaaaaaagaaatagcgacaggaaatagaaaaatttcctgcggccggttacgcactcaatactcaatcacaggttgttatcatggcatataaaaataaactctatgcgttcgccttattggcgatatccccgctgtcgatggcgcaagactggaacggtacggtattagggtttgaagctccgccggagcctgtgctgggcgaaatgctcggcatacgtaaaatccttaacgataacggttttacctataacctcggatacctgaatgaaattggctggaacggcggtggcggatataaccacgactcccacgtggcctatattgaccagttcgcgctgaccttcaaccaggacctggagcgctggaccggtatcccggacgcgcgtatcgaggggaacatcgtcaaccgcaaccacaatgacgatctcaccaccaaacgcgtgcaggacccgcgcgtcaacttcaacgatctgacccaggagagctggggcgggcagtcgattacccgtctgggctggctgacctttgcccgcagctttgacgaccggcgtctcacctggcgcatcgggatgatgaacaaggtgcaaaccttcgatcaaattatcccctgtgattttcagctgctgtcccagtgcggcggaaagtcagccaactcgctgacctggaacaactggaacgtgcatacctggggcaccacgcttgcgtataaattaacgccgacgctgaccttaaaaggcggcgtaatggagcagaatccgcaggccgccagccgcagccatgcctggagctggtcgacgaagggcagcaaagggatcttactgccggttgaaatcgaagcgcgtccgctgattaacggcctgccgggcgcgtacaacctgggcgtggtgtttaccaacgcgccgcaaaccgatctctatcgcggcaaatccggtggggcgggggcgacggacccggacggattcgatacccacagccggacctggttcatgtacgccgggctgaaccagcagcttacgcagcatcaggatgacccgaatcgcgggttgagcacctcgttcagcatgagccttgcggatcagagcactaactacatgcatcaggtttacgccgcctcgctgcgctaccgcggactgtttgatgcccgaccggaagactggattggctttggcttaacctggattgatatgagcagccagtacgcccgcaaccagcgttacctgaacagcctgagcggcgtgagcgactacaacaatccggcctggcacccggtgccgggccattccctgaacggcgagttttactaccgctttcgtccggtgtcatggcttgaactgcagccgggcattcagtactggcaccatcccggcggggtcagccgcacccaggatgcctgggtcaccgagctgaaaacggtggtgaccttctgatatcacggtagcaagttcgatccgcgtcacgtttctgacgcgtgacgcattgaggctacgaatgaaactgttagagtgccagaactggattattactgcttaggcaggcaaaacctgattttctggcatctgccggaggtcaggtttttttgtttctggggttcagatgaaaatcgccaagatactcaataataacgtggtggttgttcaggatgagcgcgggcgcgaacaggtggtgatgggccgtgggctggcctttcagaagcgcgtcggtgaagcgctggataccgcgcgggttgaaaaggtgtttgcgttacaaagcgatgaactggtgcgtcggctcggcgagctgctgagtcagattccgctggaggtgatgaccacctgcgaccgcatcatcgggctggcggcgcagcggctgggcaagctgcaggagagcttgtatatcaccctcaccgatcactgctactttgcgattgagcggcagaagaacgggttggccatcaaaaacgtgctgctgtgggatattaaacggctgtatccgaaggagttcgaattagggcaggaggcgcgggccattatcgccagacgccttaacgtcgaactggaggaggatgaggccggttttatcgcgctgcatctggtcaccgcgcagcttaacagcgaaatgccggaggtgatgcacgtgacgcgggtgatgcaggagatcctgcagctggtgaagtatcagctgcagcttgagtatgacgaagagtcgctcagctaccagcgtttcgtcacccacctgaagttttttgcccagcggatgctcagccgcaccgtggtggaagatgacgatgtctcgctgcatacggcagtcaaagacaactacgcgaaggcgtggaaatgcgccgagaaaattgcgcagcacctgaacaaaagctatcagcgtgagctgacaaccgaagaaattatgttcctcgccattcatatcgagcgggtgagaaaagaggggcgttaagcctcaaaacaggattgttactgcatcacgcaggcaaaacctgagcgcggccttcgtcagaaggtcgttctcgggtttttttatttttgtactcagtcaacaggtgcctgcgggcatcggatgtaaggaaatcgagatggaataccaggcgttagcgaaggatattctcggccacgttggcggaaaagagaacatcgtcagtcttgtgcactgcgcgacccggcttcgcttcaaactgaaagagaatcaacgggcggatgcggaagggctcaagaaaaacccgggcgtgatcatggtggtcgaaagcggcggccagtttcaggtggtgattggcaaccacgttcacgacgtctggcaggcagtgcgcaatgaagcaggcctgaccgacgacgcccctgtcgtggaagagaagggcgaaaaggggaacctgctgggccgcctgattgacatcgtctccgggatctttaccccatttatcggcattctggccgcgtctggtattctgaaggggctgctggcgctggccgtggtctgcggctggctcacgaccgagagcggcacgtataaaatctggtttgccgccagcgatgcgctgtttttcttcttcccgctggtgctgggctataccgccgggaaaaagttcggcggcaacccgtttattaccatggtgatcggcggggcgctcacccatccggtgatgattgcggcgttcaacgccagccagcagccgggggcggtatcggaagcctttttgggcatccccgtcacgtggttcaactacagcgcgtcagtgatcccgattattctcgccgcgtgggtcagctgctggctggaaaaacagagcaccaggccgctgccttcctcgatgaaaaacttcttcgcgccgctgatctgtctggccttgaccgtgccgctgactttcctcgttatcgggccgctggcgacctggctgagccagatgttggcgaacggctatcagactatttacgttctggcaccgtggctggcgggcgcggcgatgggcgcgctgtggcaggtctgcgttatttttggcctgcactgggggctggtgccgctgatgatcaacaacctggcggtgctggggcatgactccatgctgcccatgcttttgcctgcggtgtttggccaggtgggggcggcgctgggcattttcctgcgtacccgcgatgcgcgtcagaaaatgctggctggttcatccgtgacggcaggtatttttggtatcaccgaacccgcagtgtatggcgtaaacctgccgctgcgccgtccgtttatctttggctgcgtggctggcgctatcggcggggcgattgtcggctttagtgacacccacgtttactccttcggcttcgccaatatctttaccatcgctcagatgattccgccgggcggcgtggacgccacgctgtggggaggcattatcggcacggtggtggcgctggtgctgagctgcggcctgacgctgctcgccggtatgccaggaaacaccgcgccagaaggtgtggtctccgcgggcgaaaacgatgtgctatcgccgatgaccggtaccgttcttgctctcgaccaggtgccggataccacgtttgccagcggcctgctgggcagcggcgccgcgattattccctccgataacaaagtggttgccccgtttgccggcgtggtggcctcgctgttccagaccaaacacgccatcggcctgctcagtaacagcgggattgaagtgttgatccacgtgggtatcgacaccgtgaagctcgacggcaggccgtttaccgcccatgtgaaggtcggtgacaaggtgcagcccggcgatctgctgctggagtttgaccgacaggcgattatcgatgccggatacgacctggcgaccccgattattatcagtaacagcgacgagtatcgcgaggtggcgaccgtggcggcaacgtccgtcattgccggtgcgccgttactcagcgtcagtcatcaataacaggagaacgtgatgaaaactttcccggacgattttttatggggcggcgcggttgccgcgaatcaggtagagggtgcgtatctggaggaggggaaagggctgtccacctctgacgttcagccgcagggtgtcttcggcccggtagttgagcgcgtccctggggacagcggcatcaaggatgtcgccatcgacttctatcatcgctacccggaagacatcaagctgttcgccgagatgggctttagctgcctgcgcgtctccattgcctggacccgcatttttccaaacggtgacgagcagcagccgaacgaggcggggctggcgttttacgaccggctgtttgacgagctggccgcgcacaacattaccccgctggtaacgctgtcgcactatgaaatgccgtgggggctggtgaagcagtatggcgggtggggcagccgtcagactatcggcttctttgagcgctacgcccgtaccgtgtttgcgcgctacaaagagaaggtcaagctgtggctgaccttcaacgagatcaatatgtctctgcacgcgccgatgaccggcgtcggtctgccggaaaccagcagcaaaggggaggtgtaccaggcgatccaccaccagctggtggccagcgcgctggcggtgaaggcctgccatgagattatcccggatgccagaatcggcaacatgctgctgggcggcctgatgtatccgctgacctgcaagccggaagatgttctggagacgctgcaggaaaaccgcgcgtggcaattctttggcgacgtgcagtgccgtggcgcctacccggggtatatgcagcgcttcttccgcgacaacggcattcatctagaggtcactgacgccgaccgcgaggcgctgaaatctaccgtcgattttatctccttcagctactacatgacgggctgcgtcaccgcggatgacgccctcaaccagcaggcgcgcggcaatatcctgagcatggtgccaaacccgcatctggccagttccgaatggggctggcagattgaccccatcggcctgcgtaccctgctaaacgtgctctgggatcgctatcagaagccgctgtttatcgtggaaaatggcctcggggcgaaggataaaccggacgcagacggcacggtgcaggacgactaccgcatcagctatctcaacgatcacctggtgcaggtgcgggaagcgatcgaagacggcgttgaggtgatgggctacaccagctgggggcccatcgatctggtaagcgcatcaaaagctgaactctctaagcgctacggaacagcgaggtataaaattgcaacaaacactaaaactccagtgccataatcagtttttgcaactagaaaaagacttaacacaccgaaaataatgtacataacaatatcaaagatatttttcttgttgttcatataaactcccccgtttagcaattgattccaggtgcatatttgattgcagccccagtgtattaaacacttacaattttgtccaattgaaactctctggcaatattactttaatcatatcgcaaaataattttttgaattattttcagcacacctactctaacatgattcttttttgatttacataaaaaatcgaaaaattgagtcatttttccttggagaataagtgtgtaaatcttaaaaaggactattcattcattttgaaaattagagatacatacgctaatcattttattttcattaaaatccttttcgtgtttgttaataatatggagaggtgatgaaaacaaaaagaaaacagttagaccaaaattgactgaacttaatgccacaagaacaccgtacaataataaaagtgataaataattatctcttccgttcattacatgctctctgaatcccaaataattgtgtagttatacacatgccactaatgccatgtcaactccttactataataaatagaaaaaggaggttccggtaaagtaatgtctacttaggttcttcaaagacagttatataagcttatgctttttcctgaatccttctaaaataccaaataactactggaatgagtaacaatgataaaacggctccagaaattgatagtattgtataactagaatgtgcaacaaccattcctgacaaggctccacctgctgctcctgatagtgctaataaaacatcgaatgttccctgtgtttttgcacgtagagatggatgtgttgaatctataataagggcagttcccgttagtaaaccaaagttccaacctacccctagtaatactagtgctaggattagcaatgataatgagtctgccggtgcaatagctgccaccaacccagcggcaagaagtgtggcacctgaagcaatagccatagttgtgcgaccaaacttatctactaataaaccagtcaatggtgaaggaagatacatcgctgcaatatggagtcctataactaatcccacttcgcttaaaccatgaccgtgatgacccatgtgaaccggtgtcattgtcataatagctgtcatgattagttgagctaaaatcataatgacagctcctaccattattccttttttgtctatagcaggattttttagacttcctcctatttgtactttatcgtcttttttctcagcattcgcaatagctgttgatacaaacagcggatctggacgaagaaaaattaagagaataattccagcaattataaaagctgctcctgacataataaacggaccagctaaattgggaacaccaattgaatctgcaaattcccccattgtattaactaagttaggacctactacagctcctaaagtagtagaaactaaggccatacttgcagcagttgcccgttgtttctcatttgcaaggtctgtcccagcataccgaacttgaagattagaagccatacctgctccataaataagaagagaaacaaataatagggcaacgctgttaattaaagccgcgattatcacacctatagcacctaatccgcctataaggaaaccacctgcaagtccagctctgcgaccaaaacgttgtgaggatgctcctataagcagggcagctacggcagatccaaaagtaaagagggcagttggaattcctgctacattttccgatcctatcatatcttgtgcaagaagcgccccaactgttatcccagctccaagtcctgctcccccaaatatttgtgaaaaaatcaagatttttaatgtttttttataaagttggttttgtttttctggtgaatcaatataaccttgtaaccaaagaggctgctgtgttgatatatttgtatctttttttgtcattaccatgaattctacctcctaacgacacatctttgttgcttttcaagtttttttgtcatcattggaacattccatttttgttattccgtatatttaggattttcgatatatttaaaatttaaaatattcattattagaagaagctcatgattagtttttataattatgagcttcttctatttatttgtcggtgttcatattaaaatgtgtaagactcgccatcttctggcactaaaatattacttgagaatcctttttctttactaaagttttttaattcttctctagatagtgtccaatggttaacagcttccatatgaacagatataatcttagcatgaggagcagccttgtgaacttcatagatgtcttcttttcccatgatgagtgaacctaaatctaatctttgattgtctccaccattaaccacaatgatttctggttgatgtgtatgaatctcgtcttcgatagcatcataccaaactgtatccccagctacatataaaactttttcacttgggtgcttgaatactaatccacaaacatcacccattaagtttaataactcttcccctctgccatgttcaccttttgtttttactaattggatcccttcaaaaacagtgtcttgatgtagcacttctacatttttgaaaccacttgcttttacttcttttgcatctgcttcattttgaacaaacattttgatgttttttggcaatacgttttttgccacatcatcaaagtgatctaggtgtagatgagtaacaattaccgcatctacgccatccagaatgttatcaattgatgttggcaaactcaccaaaggattaaataaatcttgtctgatcgtttcagggaaagtagcgtacgtacctttctctgctaacataggatctatcaaaaattttttatttgcgtattttacaacaattgttgcatttcgaatttgtgtaatattcatatttacaactcactttctttttttatttgtcttagatcgacagagttaagtgtataatatcagcagtgttcgaatacatagataaaaaaaagtgttttaactctttgactttattttcgaaaggaattaacgttcaaatagatcaaacagataaaaaattatagagaaattatgtataatagccgaattcaatgaaagatctgggagagagtacatttaacatgcccagcagctacagctagagtagagaaattagaagagaatggagttattgagggatctaacattaaagtaaatcaagcaattaggtgctttatgtaaaccttcatcaatatctatatttatggcaaaaacaatccctgtatatggtcttactatggatcaaaaacaggacatcttgatcttttatcagatgggaataatgatactgaaaaacaataaaagataatgaataaaggatgtccagaagtatttttctgaacatccttttttaagttgttgaatcatctttcttgtgaaaagaaagacgttatgttcgcgcaggaaattcttttattttaaaaatgcctctgtggtttttactgttgcatagacaccatttaatgcggccataaatgcgtaatggacatgctcagcaggaacgattttatcttcaatttgcaatgttgttgttgcgcaagcatcttctaccacttggcatacataaccatgttcaactgcagaacgaactgttgcatcaatacacatatgggacatcataccgcaaacaactaattctttaaccccttcttcttgtagctttccatttaaatctgtattgaaaaagctattcggcatatgttttacaatgactgtctctttctctaatggacgtactgactcatgaatttcgacaccttctgtatttggatggaaaaaatgagcgatgttaccttctgtgatatgctgtacatgaaagacaggtgcgcctgtgtttctaaagtgtgaaagtagtttagccgcattttgtgctgctttctctgggtttgttaaagccatcttcccatttggaaagtaatcattttgaatatcaatcactaataaagctgttgtcattttttcacctcttaaaatttttatactgtataaggatatataatttccattgaattttcgatggtctcatgaaatactattttgtaaaactttttcactgtgaaaggagttactatgcaaattgattcaattgattttcaaattctccaattattaaataaaaatgctcggatacaatggaaagaaatcggtgaaaaaattcatatgacaggacaagcggtaggcaatcgcatcaaaaaaatggaggataacggtatcattaaagcatattcgattgtggttgatgaattgaagatggggttttcttttacagcctttgtcttctttttcatgaatgcatatatgcatgatgatttattgaaatttattgctactcgtaatgaaattagcgaagctcatcgtgtttcgggagatgcatgttatcttctgaaggtaacggttcattcacaagaagttttaaatcaccttctgaatgatttattgaagtatggaaactatcagctttatttgtctattaaggaagtaaaaaagcattataatacttcattaatgtctgatgaataatgcgcttgttattataatgtataaaaaggccccagcttggtaaattccatatccaacctagggcttttttagagcatatatatcatgttatatgaccgcacatctccgttttataaagttaactatttaccaataacaatcgacactttatagtttgcatgtttatttaagtcatttaaaaattgatctaatacctcgtttgaaggaaatttacattcaagcaaatagcaaccgtctccactaactttataattgtttattacatagttatcttgtgtttctataaaagctaaatagggttgatgatggattttttcgatataaatattaagaaaagcatgtatagagaagcctaatttcacttgattcacttcgatactacatccttttattatgccattgtctattaactttactactcttgatgcggttgctggtgcagtgagatgtactttttcccctaattttttcattgtaaggcgactatttttagacagctcatcaagtatttttttatctatttcatcaatcattttcttgtatcctttctgaaaaataagatgtattttacatattttgttcactgaacatttttttatgtttgcttaaaactttaaaagtaaagtgaaattgtgaaataactttattttgcctatgtattgatcgtttgagaaagtatatatttatttgcatgcaaatcaaagaggaatggacaccatttaatatgaaacaatttttcaaaatgttttttccattgatcttgtataagttcattattttagaggtgaaattatgaaaaaatttgatatatctgttttatcagttgctccattaagacaaggagaaacaatgaaacaagggattgattctgcagtgtcattagctaaagctgtagataatatgggctataaacggatttggtttgcagagcatcataatcacgacgcttatgcaagtgcagcaaccgtatcaattgtacaacatatattagcaaatacaaaagacattcgcgtaggttcagggggtattatgttgccaaatcattccccattaatcgtagcggagcaatttggaacacttgaaacattatatccaaatcgtgtagatttggcattaggacgcgcacccggaacggatcaaaaaacggccgatgtgattcgtcgttccaaccataatggagtgtttttctttgaaagagaagtaaatgatattttgcgttttgtcggggataagagtgtacagggtgaggttcgcgcttatccgggtattggaacgcatgtgcctgtttttgtgttaggatcctcaacggattcagcggaaattgctgcaaagcttggtttaccctatgcatttggcgctcaattttcaccccattcgatggaagaagcgctctctatttatcgagaaaatttccaaccgtcttcttatttacaagaaccttatgtgatcgcttgcattaatgtgattgcagcagaatctatagacgaggcatcttttatttctgcaagtcatttgcaggtgtatattgatatttatacaaataatttaagtaagcttattccacccactgaaaacttcctagaatcgttatcacagtttgaattagaaattctccacagtcgactggggtatacaatcatgggtgatcgagaaacaattcgtcgcgaactaattgatttccaacaaatgtatcacgcagatgaattaattgtgttatctaatatttacgaattgagcaaggaaattcagtcgtacgagattttaaaacaggttgtggatgagttgtttaaaaaaagaatggagcaactttagaaatcgagtcagttgtattagcttatgttctcctcaagcgcgattgttgaacaagaaagaaaagggtgatacatattaatcatgtataatatgtatcaccctttagtttttttgaacgaataggacatggttcgtttcttttacaatgaacggatatctttttcctaataaacagaaggaaccgccgaccgtttggatgacttactttaagtaactggtgagttttggtgagcaagtcttctcccatagccgtattttccacacaaaaaaataataccaaaggtggttaaacccttggtattattgagatgcggccgagaggacttgaacctccacgggttattcacccactaggccctcaacctagtaaaatcatatctttatttacaaaagcctttatttatagcattaagttattttatttacactgattttcatgatttgttatttattctgggcagtaaatgggcagcaaactcatagttcgcccttttcaacaactaaactctataaacataccaccattgtttggtcgttctgatgtttgcagctaatcttctttctaatagtttattaaaatccagtacattacgatctcttatcagaatcatttagtaaggcagctgctacttttaaactttcataatcatgctcgtttttttcgactgtaccgtacgtttttaaagatgatgtaactgtccctattagtttatctgcttttttatctccatcaggaagttcataaagaacttttcttattgtatttctccaaaaggttagttcttttttataatcgtttaacttagctaagaggaggatttgttttttcttctcatgatattttatcctatcagtttcctcaaacgcttggttcaaggtctttcgcagctccgataattcctcgcttttcttctttgattttttatcaagatcttttgcattatcctcaaattctttgatttcatttttcatttttgcataatacttatcccatcttttgttcataatcaatgctagtatattaagcattataaaataaatagatgacgtaattataagattgattaattgtttttttgcaggattaacaatctgagattcataatttacagaaatgttatttccatttttatcaattctaatttccttatcgtttaactttttttgtgttgtaattagcaactgaacgctattattttcaacgattttcgcaatctcaaaagtggaattactttcaactcctatattgttcttatctgattttacatttataggctcatttgaactaatttgttttacatctagtttttgcggaaaagttattcttaattccttaatatcatgatagggacttatatttattggcgtgatatactgaccggaaacttttgtaggttgtccaatactaactgtcgaagtaccattgtaataagacccaacccaactaatgataaaagtgatgattgttggtattagtatagtccaaatgtattctgtgactttttcttttttaaacatattttcccccacctagcttgcctttatataatctactttttaaacaaaaaaataaaatttaatataatttctttctgatagttagttcactttttataaataaaagaaaaagcttaaccttcgaaaaaagattaagcttttttcctcttttccaattatctaagctatgcccctacccgatctgcagcaactttaatttcagtattatgatcactttgcaaataagttattgaaaatacactacttaaaatcactgctgccaatagaatccggctgattttcatcaataatctccccttttttaatttttcgtcttgcttcaatactcatacgataatattcattagagagcattaaatttccttgttcatgaaaataatcagcgacttcaatcgaaaaattttcaacatcagcaaacatttttctcgaagccagatatgaaaatgcattctttattaattgagtctcaccatcagaaaaaaataatccctctaatattttgaatttcgctgagtattccttatcatcacttttatcggcaataaatcgccctttcctaaagtatatcaaagcaacattataattttgttgttttgcttctacataggttagagtgaataaagtctttgttaagaaactatgttttgatttttcaaaaatttctaacgctaaaattaaatgttgtgaagccttcttatattctttcaattcatcataacaaatcccaatattcatatgtgacattgcaattaaatgctctatgttactttccttggaaatttccaaagacttcaaaaattgttccaaggctctttcatattccaatgaatcgatcaagtttcctgctacaataaattgacaacgcacagtctggacagcatattcttcatactctctaaatattttgagtgcacgatttgcataattcatggagaagtatgtttgtttcatataataatatacataggacactttgaaaaaaaactctgctttctctatttcatcctcaacttctgacaactttgattcagctattcgataagcacttatcgctgaaattaattctttacgcctaaactcgtacatacccttaaaaaagtaaaaatagtattccaacatgccagttaattgcccttgcttctcaatttcttttatagtctcataagcattattgagatcttctatttccttagatttcatataactcagcattatctcatgtctaaattctaatagttgataatataacagggcatcttgattttcttccatgtttaacaattctttctctacttctgtttttataatctcggcttgctcaacttgatcattttttattgatgtataccattcatttaactttttcgtgactaagtcgtacggaattttatctttatctaagaaaacaccccgcaagaaaattcccccatccttacataaaattgtgcgaatttttacattaattgtattatgtcagaataacctttattttacaaagatgaattgcaaaaaggtaccttatatctattcctttgcggttttttttcggtcatagcaattcttttgcgacttgacagtaacattgcaaacaaaaaaaagaaaaactctattcctccttctttcttttatttttttatgaattacccaaacaatccagactgctttaaaataagtagttagaataggagtctatgttatataattagatatgaaatgtttacaaacaatggattaaattaggtcggaggaaatctaatggacacattaaaaaaattaaaatttgaggctaatggaattataggagtacttctagattactctcgcgagcctgtactcacaaatattattgatcaatttcgaacatctcttgaatcaaatgatattgagttaattcgttattcactagaacaacttaagacttggtatgcacgaaaccgcaatgaaatatataaaaatgaatttgtttttaatgagtttgaacatcatgaaacagaaaataaaataaaaaaatttttagatgaattgcctgtagtagatgagactgaaaaaagcagcataactcacttttcaagtgatcaaaatagagaattagagaaaaaaatatttattagccactcctcaaaagacaaaattgtatgtaatgctttcgttgaattactagaggatataggagtgtcttctgaagatataatatacacttcttcaccttatcatggtattcctggagatgaagatattttcgaatatctaaaaaaacatctttttaagggtgcatatgtcttttatatgttatccgataattactatgatagcgtatactgccttaatgaaatgggggctacttgggtgaatagcaataactgctctactttcatcctccctggttttaagggcgaaataaaaggagtaattgataaaaataaaaaagcattctccttggaggaaccaatagacttatttaatttaaaagaaaaaatactccgtatgtatgatctcacattagaagataaaaaatgggaaaggataaaggctaaatttaatacgaaattaaaataacttaaatgccactgctagtagcaccaatagtgtaaaaacaacttttacccataaatctattcttagaagacatatttgatttagtttccaacttataaaccttataattttcattcttaattagctaagttcttaccctatctctgttttaccaatgtcaataaaactaaaagaggagtaaacacacggtttactcctctaactctgtctcttctccttttacttcttcatagtctggtgttttctttgataaccccagacgatcattttccccattccccggcatatcagtcatcttttcatatttatctccaaatttttcataatacttaaatgttgttaattcacgtgaagagttatccggcatataaaatgcaaactgaatatatttgcccccttcatagactctaacaatcgcattctctcttttaatatttatctctgtgtcatttcctttatgctctttatattggctaattacatcatcaatcgcatcatcatacttgcttccaccacatgcagttaaaacaaacatcatcatcaaactaaggaaaataaaaaggtttttcaaaataaacattacctcctttttcaatatttagtataaacaaacaaattgatcttttccaccttttatccatttcccttaacctgcacattatcgactaaccaaccatccttttcttttttcatagtcgtttgtacaattaacacttgattcgtagtgactgaatttgcagttgtggcgacttcaacaatgtttaaaaacaattcatgagactcatctaacggctttgaataactctctagtgatagtaattcactttgcacgctgactgtgtgcttttgatcagaacgagaagggaatgcataatcaaacccttttccagttgtgtgcttcttaactgtttcatatcgtatatctatgtcggagtaattaaaaaacgcttcaaaaaatgccttattttccgaagcgctacttgttgattctatatggttcaattccttaattttttcgctcaaaacttcatttttatcttttaacttttcaatcttatacgtttgctgtccaatcgtgaaaaatccagttaacatgactaataataaacaagctgaagcccatgcaatatgtgttttcatattttcactcctagttatttaatgcgtccaaaagatacaaggtgatctctccagtaacctgatttcagatcagaatattggattccactgtcatttgaattaaacattctgccattgcctacatagatgccgacgtgagtaatggcttttccttcgtatgtgccgccaaagaacactaagtcacccgcagtcgcttctttttcacttattttcttggttgccccatgttgttcttgtgctgttctaggaagagtgattccagctttcgcaaaagaccactgaacaaggccagaacaatcaaatccagtttccgggtttgaacctccccaggcatacggttgcccttcatatttcaaagcttctttcatgaccgtttcatagaaatccatagagcctttcacaggcttcacatttttatcagagcctttcacatacctcatgacatggtcaacataacttgggtcaccgtagcttttccagcccattttaaaagcttgcaatcggctgaaatcaagtgctaatttctttgtgtatttcccgccattctttttgacatagtctataaatccagaaccaaagttgtatgcctgtaaggttaaacgaacatcaccgccagcctgtttaaaaaccttcttaaaatgtttaatgccgacttcaattgaacgttctgggtcagttatggagttgggaggtaagccgatactttcggaactttgcatgatatctaaagaacgcccaccactttcttgcatggtgagcgccataataatattcacttggtcaaaaacgccttcttgacgggcatatttctcaaatactgctctaaatcgttccacttccggcgcaattccaactgtttcatattcgccatccccgccgcctataaaatcgtccccgacttgattttctcttgaaatcgtcataaccactacgatacataaaacaaaaaagaagataaaaggagccgagaataccaaaggaagaactacctttttacttatcatcttgttctttcatcccttctcagtcgatcttctacttttgatgaagagcgtcttgcaatttcattcaaagacacttggtcaaatgaattaacgctttgttcagtccgtttaattgtttgtgatgaaggctgtttttctcttgatacagtcttattttcagcaggagcaacagcctgtttttcatcaacacgaataccatctgaatgaacttttgcgggttcagatggtctgattttacgttcgttattggcaataggttgattttctacttttgtagattgaggactttcaaaaccgagctgcggttcaggttgattcatcatgactttttgatctgatcgtttgatttctgctgttttctcttgtgctacaggctcactattggaaacagaatcatctttctggacttcaaaatcttgttgctgatctgtttcaagattctgattttgttcgtcataaatatacgctttctgatcagtacgttctgtatctttttcattctcttgtaagacaggcgcacgattagaagtagattcttcttcatgctgtaatgatgcatcgtcagtttgttgctggttattgggctgtttaagaagctgttccacatattctttttgatctgttcgtgctgattcatcttttttatcctgcaagataggtgctcgtttggataaatcctcattcccttcattcaaagcatctttcaacataggagagtttattccgtcttttctcaatctggctaaatgggattgctgtttattttcttttgcatttgcaaaggcttctttttgtttttgcttttcttgttctttcgatagagtttgaggattgcgttttaagcttcgactgttatgattagctattccgttagctgtttctttttgcggggttcttgaaatagcatgagtattatcatatcccatagcagtcccactcggtgaattaccgccaccacttggagcaccagttacgccatcagcattcgaaccgtcttttcttcccccaaaatgctttgtaaagtcagtaaatacgccgcctccgttaccccatactccacctattttcttcgcttgttcccaagcaggctgaacaatgttttgtctcatgttttccatcatattattatcaactgaaacaacttttccagcagtcacaaacttgataatggcatccctcttgtgaaaaccaatccacaagattgaagcaaggacagcaacatttaaaagatacattccaaaaccatttggcggtattaacttgtcaacaataaaacaagtcacgtacacaaacagaacgataacccctaacattgctttcagtaggtaaacactccccaagcgtccaagcgtaacaaatcccgaataagctaattgaggaacatacgctaagatgaaagcaaatggcacaaagaaaactatcactaaagcgacaacttgaagcaagaaattaaagaacgctaatgctaaaaatggtatcccaatgacaatagaagcgaccacagcgataaaagactctcccagctgattaaacacatttccagaagtcatagattcatttttataatcatcaatttcagtctcttttatataatcttttttatctttttctccatcctctgaaagcttataagaaagcagtttatctatacgattaagtccgcctttatctgtatcttcctcattgattttcttttcgcttgtttcatcaaaattcacaattaaaaaaggcttcatcaaagcaatgtcaaagtaaagattacgcataaccgcaactgtgccttccatttcttttcctttttcaatcgctgaactgtctgcaaaattgccttcatcttgaacaatgccaaccaatccattccccgcagttaaaagctttccttgagcttctacagacaaggcattcaatactttcatgtaataaccagcgttcgacatccaaagcccaccgatcaccatgacacaaataaatagaatactccgccgcattgcttcttttacgctacctctcacacagaataggtagacaacataggcgcacgtgaaaataaataaagcttcaccgaaattctttttcagtgttttataaactgttttagagacgtttgtaatagaatttgcgaactcgtcaatcggttgcaagttatacaaaatatccatccccgtatcaaccacacggacaatgtttcccgcaaaagaaaaagtgacgtttgtcagcccaacaaacgcccccttgattaaatcgtcagatgcttcattattcgcttgatagcgtgagattggaaaccttttcaccttcaattccacgccgccagctttttcgacttttggctgcgtcgttgtatctccatcagccgaaaataccgttacagctgaagcaacagttaaaaacagcaacacaatagccgacacaatcaaaattcttttctttttcattacaaccacctcctaatctaaccgagttaataaataaaattggtatctggctttctctaagtctctttgcgttagcaacacgttttcaggatatcgttcatacagagagaaacagattgctttttgatatttcatatgtctgaaagtctttcgattttgctcaattctgatacctaataatttttgcagaaactgtgccgttgatttatgtccgataaaacttttgtatcgaccatcataatgcttcagccattgtttaacttcgtccaatgtgattttctcagctttataaaagcctggactcgtgacaacaagagagtttaagaaagctatttccatgtacgattcaacccctttttacaaatatttttcttccgcatatgcgacggcttttttctcaactgttttcagagcaccttgccattcttcgaataggcattcaatcgaaattttagaggtgcggccatagtaatctttaaataagcattgaccttgaaacatggattccatcatttttttgttatcttttgtgacctccatgttcatccatttcaacacttcttcacgctcgtttggttcgtcaaaagcaaaggcaacgccaaagtttccagaatcctcttcttttaaagcgtcttttgtggattgagaaatgaagtattccgcattgttgtatgagcgaccaatccggcgcatttgtctttctactttttttccttgttgtgacgtggtgaatatccaagcttcatctataaattcaacagtctgttcgtcttgattcatgccgaatagctcgcagaacttacctagtgcaaacatgaccgcactagactttagttgtgatatcgtgtagttttcaagtcgctcagcatgatccggcaaatccatattttcaacttctaaaatggtaattcgcttttctagtgacaatgcaggatttgaaccatcatgaatacaaagtttcaaaatggaatctgacacgacctcatttaaatagtcaccagctttttgtacagcttcttcgggatggctctgcatcttccgaataatatcaagtgagccgacctgttcacctttttgtttcgcatcaatcacttctgacgtagcacgaaggaaagctgtgtttatgtcgtccttccctttaaagtcatatacttgttcaaaaatgacttgaactagctcttttgctttcataggagggaggaaggagatagggtcaagcgctccccagttgtgcgtgttttcatgatctagcgtgatatagttgtatttctctaaatgtgcaatatataagggaaagttctctctaatgtactcatcattcaagactctttgaatccactttctcatttcctttttagggtctatatacagagatttgatgtttaacatgctgatatagttaaagatcaatttcgctagatatgacttgccgtttcctgtgtctcctgtgattaagcagtgaggagaacgtgtctttgaaccttttaactgctgattcgctaagaaagggtggaataagacaaaatcacggctggacataatggcactttctaagtcggtgtgctcttggaaacgatcaacccaaccgagaaagaacccgattttcgaaccaatatcagagttaacagcaaacagactttcagccacaccgtcttgcgttgttttttgaatccagttcttatcggttatgtctaacttttcaccaggaagcattttataaaaaaggttcaattgatcagccaccggaagccgacaagtaatgccagcgccttttaaatgccttttgacaatcgttgcttttcccacacattctttttttgtctttccatgaacgactatcaccgacagccagttcatcacatgcacatcttctttctttatttcatcttgtaaatgccttatcattgtggcacttgtgacagtggaaacatcacttcgatcgcctgtgctttgttgttctttttgttcttctttcaattgctgtcttttgaggttgagggcaggcttggtaatggactttgattccgtttgaattttcatctgaacttcaacagggaagggaagagactgtgcttcataaaacaaatcactttccgacatattgtgaagaaattcgtcaatcacgacaaaagctgaatagccttcatcttgatcactatgcaaatgcaatactgatgggtcagtggggtctatgatcgtgtttgtaatagagcgaacatcctttatctcactttcttcattcgtttggtgctttaacccacgtacaaagtgataacggttaatgtatgtcatttctgtttctgaaagccgttctccgcgaacagaagccatgatattcgctagtgtttcttcgacttcctcatatttttcaaaaaaagaggtggaaacattttgttcccacccgagcattttcacgactgtatcagtcgctgtattgaaaaaagatagtatattgtctttaagttcgacactaatatttacaagactgcttttcagttttacacctaaaatgaagtcgtactttgtcagccttcctaatcgctgttctaacagccttacggtttcttcattgtagtaacgtgccacatccattgcatctgccgcaatatctgtttctaaatccttaaatcgtttttctaattcatactcacttggatacatcatcaagtgaaaatcctcataagatgtaatttcttcaaaaagatgctgccacttctttttatacgattcaactttttctttattttgcataggaatcgaattgctttttattcggtagtacgcccacacgtcgcccgttcttgttaacagcaaattcttgtgtattgccttcataggcgtttttagtctcatttgaataatccaccaccttcacaagttttcgaaactcaatttgtttttcgttacttaaatcaatctttcgatcattgcaatacttcttttgtggaagcttgatgaagaagtaatactttgcgaaatcaaagaaatatatatagatgtttttgccttccggctttattttcgttacaagcatcgttaaaaaaaatggtatcccaaaaatcacaatgacgtaactgttatcaaaagcgtgagggaaaatcatcctcacgccgtaccagaatccaaagcataagccaacaaaaatgaaatagttaatagccggtattaactcaactgcaaagggtaacgaataattttcggttaattgttggatttttttcggctctctcattgccttccggtagttgaacaccagacgccccattcagatgcccccttacaatttttccattagcgcattgatccagccggagaattctgaccagtgtttaataacccacgttaccgcactgccaatacagcaaacaaagataatgccgcccatttttaatttcatcagattctttgcggctatgaacatgaccacaatcgtaatgaattggataacaacatctgatgcccaaccttttacccctccaagtgttggaaggtctgcgccaagaataaagaaattcatgaaatccatatttaaacctcctattgatgtttgagtttatttacataaaactgaccgctgttttccgtaatctctagactgaatttttcatttaccggaatgtcattttctttttccttaaatcgaacagcacaaaaaacctcgaaaccttttttcgtctcgaagattttcactgactgcacttccccaaataacaagtttccttccaatgcttccggctttttcatcatataaaccatttcttctttcttttcagaagcgtatttctcaaagaaattttgaagaaatgattcgatagattcttttttctcgcctgcatattcgtctctagtttcttctttacccttaaaagcaatatcgcctttcagatcataaatctgtgtaaaataagggacagcagacaccgcaaaggaatcacctttatttgtgactggaatattcagcaacatttgtttttcgtatttctcgtttgttttaaccttttctttcaccttctttttcttctttccgtctttaacttctttttcaacttccttttctacagggtatagattttcatatgtgaccttatattgaaaaaggctgtttttatcaccttctttcacgttatataagctgtaaccctttaactctcgatcaccttttaaaccatccacattgaagcgttcttcatcttcaaaatggttatcttcctgtttaaccatatagctttcaaggctctgcatacgtttttcaatagattcttgatcgttcttcacattcatatattcattgatgaaccctgacagaaagttttcggcagcagtcaccgaaattttttgtttatcgtcatttgttggcttattcgtttcgtctttcatgtcattaagttgggagcgagtattaattgacagaagcacagcaagcagacagataaatagcaagctccctacacaagaccatagtgtgacggctatcagctttgacctgtcacggggtactttttgtttgtctttttccggtctttcaattcgtttcagtttttgaaaagcagaccgaaaaaaggattcttccttcttatcagagccaatttctttattgagcaactttttcacactccttctgttcaatttgtttcgttctttccaagaaagataaaaaggatgctacacgatgtaacaccctttttatgctttgattctccatataaacttttaagctagtcattcgaccgtctggcaagtatcttgttttatagaatgtgtaacgatactcagcaaatccttttactcgttctccttcaacaaccaacatgcaatctctgcttaaacttctcacaaaaactaaagagggaatgcccacattaaaacctaagcttttgaatcgtttatctacagcagacaccgcacattttcaccccttattcgtagtagctaattccttcaaactccacgcttcgttcgtctgtctccatatcttcatcttctaagatgttaaacgtagcttgaagttttgcattggcgttatttataacagcaagtgtttgaacaatgattctttgagctacatcactgtaaaaaacatcttccatcattttttcaatcagttcctcagcaatatccaaacacccaagggaatccaaatcactctcaagtcgggcctgattcaacagattaatattaaacacctgatgttccccctttaaagtcataaggaaaattgtccttactccgtaaaatgcattacttcaaattctacatttttaacatttgtctcaccgtcttcattttcaagaacattaaatatcgcatgaacctttttagtgtagttgtttactactgtaaagatatcaatcgcaaatctttcggcagtttcggtatgatacaaaacatattcctgcatcttttctattaaatcttctacaatatctaaacagccaactgattccaaagcattttccagtccagcctgattcaacagattgacattatgcatcttatccctccaagttagttcttgggtttcacccaaacccaccaacggtagctcgttggattgctgttaatctatccccctattcccccgaatcatcgggggactccctcgccggtaggcaggaacaaacggttgtttgttcaatgccaagagggtttgggtagcgctgaatatgtcaactccttatcctcacttcgttccggtaccgttgacacatacgtttaatcgcatcacctgtgtttattaaggtttagcagcttggttttaaacgaccatgtcagcaacatcagccatatacacatctaacatttttttatgtttgtcagccagttcagcttctgcaatcatatctgacagatcggttttccctaaatgttcatcagcttcaagcaccattttcatagtgggagcacaagagttacgaagccagtttcttgatttctgatagaagtctttttgtggtttgacgtacaaaggaagtctcccaacatcgcctataaaatcagaccaaaaaaggctcgttttccaatgctctctagtgatgttttcatcagcatcaacgaaccttacatagttattaatgatctgcatagcgattaaggttaaatcctttgttttcaataaagcatctatcgccacttgtgcacgttcatttttaagccgcaattcataacgattccaatcgcctagttcttctaacggaatgttatacttttctgcttgttcatagtttttctcataaaagcaaaggtacgcttctgactttttagaaccgaaatatattgtcgtcccgcctgtaatgccatcagatagatcaaaggagccattgaaatcagattttctaaatcgtgaaatacattcgcccttttgggctttctttaacagttctggtatagaaaagtatgtctttttatcatcaatagctaaatcaaagcgagtgaacgaaccgccttgttgcatgcaatcttgaaagaagtcgtaccatgttttcttccggcattccaagaaggattcaaattgacggcaaccttgaccggacatttctatcaaaacacctctgttgtcatccggcgcagaataaaagactttgatatagtccagttcatacgtgccaacgtagccatagaaaccagattgtttctcagtcataaagtctttgctaaggtgaagaacctcttcaataattctgtcaacatcatgagttttaaaagagactcgaatatagtcaaccattgataccaaaggactttcaacggcttcatttttttcttttacgattactacccccctgttagcgtgggggggttgttttagctcatccattcgcttcgctcactccttcgccgctggccgtctggtcgcttacgctgccgctggcgactgccgtcgcctgcgctccctcgactccaaccagcgcatttttaatagatgacataaaatcatatcctttcggcacgatagggctgtaaaactccaacactgaacctgtgcccacattggcatatcctcgccctgtctcctttttattcacatatgctttttcaacatcgccaaacatcattccgtaacccgtatcggacattaaacccaatgaaacacgaaagctaaactgatcacgaataccgtcagctaaatattttgcatctggacgttgtgcgcctaaaacgagaaaataccccgcctgtctccccaacatgaccaactgtttcatgtaagaaagggcttcgtttctttctttcatatctaacaaatccataaatgccacatattcatcaaagaagataaaaacaggttttaagcctaaataagcatagttttcacctgtcttatagttagacatttgcttcatttcatccattcgttccatcatgccatctacagactttctcaggcacataagaataccgttcttttgggaatagacctttttcggaagtacttcttccaagtctgctaaatctgcatttttagggtctagtattcttacatctgcccccagtccaacacatgccttaatgatcgttagcatgaagtatgttttccctccacctgtaccaccagcaataagcatgtgcggcaacttatcaaattgccatgagatatgcttcattaacggaaggactccattctcagctactgcatcatcaatggaaatacgattctttttgacatcgtaaagaagcttaaagcatacaaaaccttcttccatttgtttatcaaccaagtcacaaaataagccgttttccaaatcctttcctaagtctaggaagcgattctgaaaacggctcatgtccatagcaatacgaatatagatgtggttgtttttgacctggtaatacattctaggaaagtatgtgatcttttcctttgagtcagtttcatttgaaaagatttttcttactttcacgttttctttttcgtaaaacttgttagagaaaatcattttagcaatcttttgcctgtgaaggattttcttatagctgtcaaacaaaagaaagtaagatgcaactatgcttccaacagcaattagcacagagcataaaacgcttttaatgattaaaggcacattccattcaaaattttttatcacttgagatagatcaaaatgaatgagttgttctctccaaaaaaggaacatagacaataaaaaaacaggcacaaagatgattgcgcctgctaactttacgttgtttctcatgtacgggcggattcgtttgcccctgtatttccaaaatcttttgtttaagaaatcactcatatacatcacccgcctgccgatatgagagcatcatgttatttcttttcattcccgccagttgccgcggcaggtttcacagaagagccacctttaacaacaatatcatcagcttcaagtttccacatcacattggcatacgtcgaatccctttgactagtcgccatagcgctaatttttggatttttcaactcaatatctgcaaaaggaggaatttcttttgccccagcatactcaggaatagttacttcaatttgaccaccttggacagcactagcaatgttataaatcctagattccagtacgtcagtacgcttattattttcacgatcataaacatacctttctctgttaagtcccatgaatttcatgtctccaaaagtcatattgatatccggtacaataaagtttaagttcatttttcatatccccatttcatttttttataatttatttacaaaagaacattaatttcgattttatgtttttgattcgctccggttctgtatccatcttggcgcttatcagttgctaacggctttacgccctcatggcaacctagtaggctaattatagccatcaagctgactacagctattccgcacgcttattctagcctgctacagcatttaaagtgattgctgttcatcactcaaatactcacgcatgacatttcaacaagaataccgtataataaaagtgtctagtttttattttccggcgttcttgatgatcattcgtcaaggcgctttttttgtctatatgtagttttcaaggaacaaacactcctatcgacataagttatacaaatcatcgttatacaaagtaaacacttggttatcctttttactcaatggacgagttgaccagatacaccaccaatcccagccttttaacaactcagatatttcttcattagccttcaaatgattatcagcatcaacaacgaatgtttcacaagtggcatagtctttaaaatgattcaaatccttatcagcctttaaagcttcaacatcagtaatgattgttgcattcactcttattttcatcgcatccctcctttcaaaggattcttaacggctccctatagtggtatataacgtcacactacggatgattgccgaagcttttcaatgtcttttcttccaatgccgtaatgcttacatatcctgcgatatgaaacgccttttcgcagtaattcattaacattttcaattgttaagggaaggtttaaataatgatttataatgactgaattcagagcaattttcattcgtgctatccaatcaccttccatttgtctagctaaagggacagcttctttcataaacgagtttgttatatcaatgtttataaaaatcaccccgtttgagattttgggcctttgtaacaataacactcttcaaacttagctctactcaccttaccttgaatgaccatatatccttcttctttcatttgagcattcaaagttctaatgatgtcataagatttagcctgtttaactccaagaattttttgaatatctctcgcagttaaaaactctcctttcaaaatatcacctcctcgttaactcaactctttgtgaattaactttattataaaactccttttcgtgtaagtcaacacaaaattcaccttaaagtgtatttttttgaacatatatggaaatattgataattaaactctccataaagaagaaacaaacactcctaaaaggagaatttagaattatttatttaacttataggtgaaattaatgaattctccaaaaaatgttgttattatttttataaaaatcaactctttgtgaaatggatgataaaaatgagcctaggcaaacgattaaaagaagctcgacaaaaagctgggtacactcagaaagaagccgcagagaaacttaatatcggtaacaataacttgtctaattacgaaagagattacagagatcctgatacagacacactcttaaaattgagcaacttatataacgtatctacagactatttattaggaaaggatgaagtaagcaagaaaaacgaaactgatttactcaataaaacaattaatgaagccatacaggaattaaaggatgaagatacactcctttttatgaatgatggtgaatttgatgaggaaactgcacgccttgttaaaaaagcattaaaaaacggaattaaattcattgacgaattaaagaagaaagagtgataacaatttatacaagcaaaggaattaaacataaagtgcaatcagtaattaagacacatggtacaaataatgtctatgaaatttgtgacatccaaaaaatttatatactcaaaaatgatcttggacaagcaaacggtttactacaacatgacaaagccacagatcaatatttaatccatatcaacgagaacctccaacatcaacaatttgtaattgcccatgaattagggcattactttctccataaaagattgaacacttttaaagttgtgaattgctctaaagttctaaaagataaacttgagcatcaagcaagcctatttgcatcagaattaatactgacagataaaatgcttaatgaagcccttccatatatacagggttttagcaaagaacaaatagcagcatacttcaacgtaccatcatttgttactgattataaactttctcaaattggctcatttagtaacagaatctattcacacgaaataagcgcttttggttaaaggagaaataaaatgtctgtaaaaaaacttgaaaatggtcaatatcaagttgacgttagctttggatttgacccgattactggagaaagaattaggacgagaccagtagcatcaaccagaaaagaggctttagaattagaagcaaaattaagaagagaatttcaagaagaaagagcaagaaagtccagatcagtaagctttccgactctaatttcaatttatttagcaagttgtgaaatagatagtaaaccaaactattatcagaatcagaagtacattataaacaaacatatatctgattactttttgaaatctgatatacaaaaaatcacacatagagaaataactgatttcagaaaacatttaatggaaacaggtctaagcaataaatcggttaataatataatgactagtctaagcaaaatttttgatacagctgtacatgaagaaatcttaaaaagaaatccgtgtgacaacgttaaacgattacctttaacaagaaagaaaatgaagttttggagaccagaagaattcaaaaaatttattagtttaattcctcaagatcaattattgtttaaaaccttttacactgttgcttttttaactggactaagatgtggtgaaatgctcgccctgcaatggaaagatattgacaaaatcttattagaaatagatgtgcataaatcgtgcacctggcttgatggtcaatttgttgttactactccaaaaactaaaaattcgattcggcgagttagcatcaataaaaaattgcttaagctactagaacgttggaaagaagcacaagaagagttgtttaatgaattaggtattagacattcacatgatacctatatctttcaatataaagatacaccttcaagaaaagatattttcagtcggaaaattaaatacttttgcaaggatagcgatcttactcctatacgtttacatgattttagacattcacacgttgcactattaatacaccaaggagaagattacataacaattaaagagcgtttaggacatggttctgtaaaaacaacaattgatgtttatggacacctatatccaaacaagcaaaaggaaatggctgataaattagatgacttactttaggtaagtgggcagtttgtgggcagtaaatcatttgaaaataaacacaaaaaaataccaagggtgtcaaaacccttggtatcattgatgcggccgagaggacttgaacctccacgggttattcacccactaggccctcaacctagcgcgtctgccattccgccacgaccgcgtgatcattaaattgtgttgtgctggtttagtaggctcttaacctagtaaaacagatttgcgtgcactttgtaaataaagtgcgggtgaagggactcgaacccccacgtcgtaagacactagatcctaagtctagcgcgtctgccaattccgccacacccgcaaaaagacaaatggtgagccatgaaggactcgaaccttcgaccctctgattaaaagtcagatgctctaccaactgagctaatggctcttactattagatttcaaaaataaaaatggctgggctagctggattcgaaccaacgcatgacggagtcaaagtccgttgccttaccgcttggctatagcccaacgaaatggaatgacccgtacgggattcgaacccgtgttaccgccgtgaaagggcggtgtcttaaccgcttgaccaacgggccgatggttgagaacttatatcgaaatcttatggcggagaaggagggatttgaaccctcgcgccgcttacgcgacctacacccttagcaggggcgcctcttcagccacttgagtacttctccaatatggctccacaggcaggattcgaacctgcgaccgatcggttaacagccgatagctctaccactgagctactgtggaataatgagacaagacttattatatcagccttgatttgcagtgtcaagaggtaaatgtttttatttatctctcgtgacgacttttataatgtaacataggcttgccatattcgtcaacctttttcacgaaaaaattctttttatttttccgcggcattttccgcatctgtatctgtcagggttcatggcgcgcttctttatatactgttggccgcaggtcgtacagatatacatataagtttttttgttttccgcttttttcttaaggggtgtacagaacctcggcgcgttgacctgctgcaatagcattctaaaatctctgtctctgtgcttgtacccttttccttcaagatgaagatgataatggcagagctcgtgcttgatgatgccaatcagttcctccctgccgtgttcaatcaaatattttctgttcaattcaatgttatgggaggttaacaggtacctgccgccagtggttttaagccggtcattaaaaagcgcctgatggcggaacggctttttaaaatatgtttcagaaatatcctctgtcagcttttgaagctctttgttatccatggtgcacctcacttaaaaaacattgaacgggacaattcaccgttcgcatacaatatggtaatcactgtccctcttatgataaaagctgaggaggaatgagcctatgccaaattggcttaaaaagcagatgcaaaaagcgttccttgaaaaagataattaccaaattaaactgctgaatcaatgctggtatttctataggaaaaaacactgctcgtaagcagtgcttttattttaccatagacagcgatactctgcctttttgtacatctacgccgtcaacccaaactgtcacaatatcgccgacagatacgacatcaagaggatgcttgacgaattgattgctcaattttgagatatgcacaagcccgtcttgtttgactccgatatcaacaaacgctccgaagtccactacattgcgcacggtgccctgcagttccattccctctttcaaatcttccagctgaaggacgtctgttttcagcaaaggcttaggcaccttatcgcgtggatcgcgttccggccttgtcagctgttcacaaatgtctttcagagtgatttcgccgattcccagctcttttgccgtttcagagagcgccagctgattgattttgtccttcaattccgccgtgccgatatgttctgttgaaagtccgagttttttcaaaagtgcttttgtttctttatagctttccgggtggatgcctgttctatccaaaggctctgtcccttcctgcactcttaagaaaccgatacattgctcataggttttcgcacctaaccttgggatgtccttcagttcttttcgatttgaaaactttccgatttcctcacgttttttgacaacgttgcctgctacagacttcgataatccagctacatattgaagcagcgcggcggaggctgtgttgacgtttactccaacctggtttacgacagtttcgacgacaaaccgcagagattcatttaagcgtttttggctgacgtcatgctgatactgtccgacaccaacagacttcggatcgatcttaacgagctccgcgagcgggtcttgaagtctccgagcaatagatacggcactgcgctcttcaaccttaaggtcagggaattcttctctggcaagctctgaagccgaatagacgcttgctcccgcttcattgacgatcacataataaattttgcgcggcatgtctctgagtacattgacgatgaattgctctgtttctctggatgctgtgccgtttccgatcgccaccatctcgacttgatactgctcaagaatctttttcactttttcatgggcttcttttgttttgttgactggcgcatgcggatagatcacatcaattttcaagacttttccggtctcatctgacacagcgagcttacagccagttcgaaaggctgggtcaacaccgagaacggttttgcctttcatcggcggctgcaaaagaagctttctcaagttctctgagaaaatatgaatcgcctgttcatcagctttttctgagagctctttcctgatttcacgctcgattgccggctggatcagccttttatagctgtcttcaattgtctcctgcaaaatctctcttacggatgttgagcgatttttgatgatttgtttttctaaatacgccttaatgtgatccgcaggcggttcgatcgctacctttaaaatgtcttctttttcgccgcggttcattgccagcaccctatgcggaacaacttttgcaattggctcttcatactcgtaatacatttcatacacatttttctcatcggtgtctgccgactttccggctgcagacttaatggttcctcttttgaaggtttcctggcgaatccactttctgaaggtcggctcgtctgagatttgttccgcaataatgtgcttggcgccttcaatcgcttcttctcgtgtgaacacttctttttcttcgctgatgtattggtctgcagttgctgccagatgatcatcttggggaagtgtcaggatatagtcggcaagcggctcaaggcctttgcttttggcgactgtcgcctttgttttacgtttttgtttataagggcggtaaaggtcttccacttcctgaagcttcaccgattgctcgattttacgttttagattatctgtcagtttatcctgctctgcaatcagcctgatgacttcttcttttcgctgattcaggttttgtatgtattgccagcgttcagaaatcgtctgaatctgaacctcatccattgaacccgtctgctcttttcgataccgggcaataaacgggactgtattgccgtcctcaagcaggcggatgacactttcaacgtgtttttgtgataaacctatttctttcgcaatttgctgttttaaaagggctgacgtttccatgtaaccaaagcctccaattttgtcgttctttctctagtgtatcaaaaaccgaaaaaaacacataaaaaaagacagctggcgctgcccgtatctttactcatgtttcaatagttcctgtaagccgctcagaaaattctcttttttcatcgcagctgcaaagaaggcttgatcaatcttctcaacaattggcaaagccgctgttactttttctcctcctatttctgtaagagacaggaggacctctcttttatcctggggatttttgcttctttcgataaatccttttttctcaagcgtccgcacaacctccgaaaccatcatgatattggtctggctgaagcttgcaagttttttttgcgtgacggtttctccgtgagcaatcatatacttgcacgaggtcagcagaacaaattgaacgtgggtcaggtcaaactcagccaatgcttttcctactttccgctgccaactttgcgtggcctgccataataaaaagcccgggcttgtgttcggaccgctaaatttagagtgccattccacttatgttaactcccatcgcttgtgctattgtcaaaaaatcttttttgcttatttcaaagtgtcctctgcgaaataaaaagccaagatgcttggtttcctgaacaaattcaagctttgatttaatgtcgtaaaaaccgattttatggcatggataatagtctatatctaatcggtatggaataaaattcggagccatttgatacggatagatgtttccgctttttactttgccgatcgcagtaaagcttcgcagcagtttgccgtctggatatgcgtctctcggagaataataaatcagccaatctccctctttcattttggcgagcggggctttttttccatggcacagctgtgcaaaaccgccggcagcgccttttaatacatgttgctctgacacaacgccgatccagtaatttgtgttcattttatcactcctccgtaaagatggacaagcctgctgacagccgtcggcatgtctttagacagttcagtcccaatgatttctccccacttttttgcttcagcgccttctaatacaattccatatgtgatacacaaatcttctttttgcttttgaagcacgtgaaaaaactccattattacattgctatgcgggcatgttgaccatgacagaaaacgcccgatgtttctccacatgctcaagccataagagaattgtttttccttgcagaagcaatgttccttccgttccattttgaaattgtcctttcaaagaatctgatgcaatacccgtctcccattgatccattgtttctgtttcctgataacagttccaggttttcccacatccacatcagctatcgctgtgtattcataattccacatcccataagctcccagaatgataagttcacttattaattataataagcgcacttattaatagtcaaccgcaaaaaaaagaagccggatgtccagcttctttttctggttttttaggacagctgtccgagaatataggtcaggtcatcttttctcgatgtcgtatacattttcagcgaattcgatatttcttctaccgattggccttttttcaaatgggagcggatatcaggtacgttgagtccatctgtatgtataatgaactttgaacccttttcataggtggcggtgtgcgttttgtatttttgcggcttgcctgataaatagcccgaaatcggcagaggataaaagctttcaccagacggggaatgcagaataaaccgtacatttccgacagagcagtacgtaaactgcctttgctcaaaattgattttcaggatagatgctgtagcgcctcttttgtttttcatcgcctgattacagcgttcgataatgctttctacgtcttcactcgcatagttttccactaagtctttgatggctgcagaggattcgttagcaagtgatccacttcccagtccgtcagcaaccgcgcaaattaactccttatcatcagctttcataaaaaaactgtcaccgcaaatcgatttcccttctttattcagttgatatactagagtttgaatatgctcgttttcttcaacctggatcattacattaactccatcgagggatcttcaatcaaggcctctctgagcttcttcacagctttgcgttgcaagcgcgagacgtgcatttgagatataccgagaatgtccccagtttctttttggcttttgttttgaatatacgtaaggtctatgatttgtttctcacggtctgaaaggacatgaagcacgctttgcagcatcaattgctggttgacccgctcatatccgtcctcctgtgatccgacgatatcaagaatcgtgacagtgcttccgtccgaatccgcttcaatgctgtggtcaacggataaggcttgatagcttttgcccatttccatcgtttcaagaacctcttcttcagaaacatcgaggaattcggcaatctcttcgactttcggcgatctttgtgtttcagtggtcagctgatcaaccgccattttgattcttggaccgagttctttaattcgtctcggcacatgaacgctccatgttttatctctgaggaaacgtttaatttcaccgatgattgtcgggattgcaaaagcttcaaacgatttgccgacaacaggatcgtatcgcttaatcgcgcctagcagcccgatcatgccgacctggcggagatcctcgtggaagcttttgccttttgagtattttttcgcaagcatgtcaaccagatttgtatacacccgcacaagcgtttcctgcgcttgttcatcttgctttgtttggtaatcgcttatgagccgatcgacttcatctttagttagtttcgtagtttttgatggttgtgtcatgatcaactcgctccccatttaaatactttgtcatcgctacggtgacgccggagtggttttgcactctgacttcatccatgagcgtttccattaaatatagaccgagccctccttctgataattgatcaactgtgtgcgaaggtgtgtacggccctagatcctgctgcttttgatcaaagtcaaagctgtctccttcatccgccacaataacctctaaacggtcttcaaacacaccgaatcgtattgacacttccccatttttatcttctttgtaagcgtgctgaaccgcatttgtgcacgcctcactgactgcgattttcaagtcttcaatttcatcgtacgtatagcccattctgcttgcgacccctgacagcgtcagtcttataattcccacatattcaggttgggccggcactttcatttcgatgtaatcagcattattcttcattgcactccaccttctgactttgcagaaatatcaatgatgtccttcaagcctgtaatgtcaaacagtcggatcagccgttcagaaagattttcaagtttcagcgaaccaccttgttttttcaccattttaaaggtccctacaaaaacgcccaatccggtactgtccatgtagctgacatctttcaggcaaattcttaagtcagctccttgttctgccagaggaacgagcttctctctaagcaccggggctgagtatacatcaatttctcctgcaatgtttacttgtatatcattctcgttttgcttcacatcaacatttatattcattcgtatcacctcaaattttccttcaaatcactagttgctttataccctcgtctgacagacgttaaacctttctccgcaaaacaattaacgtaaaatcatcgtgaagctgaaaatcctgcaatttgaggaggctgtcataaatgtttttgaccatttcctgcgcagaggaacacatatgttcctcaatgagcttctgcagatcaggacgctccaagaaaccgttttccgttctgcattctgtgacgccgtcagaaaataaaacaatcatatcgcccttttccagatgctgatcgaattgtttgtagtcatagtcctgcgagatgccgagaacgagtcctttggcctctaaatcgtaaaacgtgttgtctttttgagaataatagaatcccggttcatgtcccgctgaagcatatgtaaattgatgcttgtccatattgtaattcgcataaaacatcgtaataaacatactggcatcaacgttttgttcaacaacacgattcaaatttttcagcacttgagaagggtgtatgcccgtttccggcaaagagtccattgcgtatttaatcatggacatgcataaagccgctggaatgccttttccgatcacgtccgcgattgcgatattgatggattccttgtctttgacaaagtggtagtaatcaccgctcatctgtttagcgggaacactgatggcgccgatatccagcgcttcctcctgaggaactttagttccgagaagcgtctgctggacatttgccgcgatttcaatttctgatttgatttcctgctgtatccctctaagggtttgatgctcctgataagccattccatagccaatcatgacttctattaaaaaatccagcgaatgaaacacatcttccgggagacttggatacagctccttcagcacttttctgtgaatgctgatgatttcttccggaggaatttggtgctcgattgtttttcggctgaatttttgggcttgatataaagatgtttctgttaattcggctatatatcgactaagcagctgatgataccgctgctcaataacctccctaaaatccacgttcttacctcctaccgaagccatttgatggcttgtatctctgttccttcccccgctacggaatttaagctgaattcatccatcagccttttgaccccgggaagtcccgcaccaagtcctccagacgttgaaaacccgtcttccatgacttttcggatatcaggaattcccggcccttggtcttccgctatgattttcaggcctttttttcctctgtctgcgacctgttcaattccaatctgccctttgccggcatataaataaatattcctggctaattctgaaatagccgttgtaattctagcctggtctaccgtgccgaaacccagttctttcgcaacgtttcgtcccagctgtctggcggccacaatatcccattctgtcatgattcttacacaggattggtcgttcattcgctattcccccaattcccgcttcaatgtctcaagcccctgctctaagtcgagcgcagtttcgatttcctcaagcgcgattccaagttcaatcagcgtcactgccacagcgggctgaatgccggtcaagacgactttagcccccattaacttagacattgtaatgacgtcccccagcactttcgcgataaatgaatcaatcatatccacagatgtcaggtcaatgacgactccgttagcacctgtttcgtatattttatttaataagtcttcttgaaaagttaatgctgtctggtcatcaagttcccactgaatggacactaataagcaattatacagtttcaagatcgggattttcggatgtctcaaaatgttattcccccaatgaaacgatttttcgatccgtcatttccaatgctgtttgaattcctttttgcagggtattcttagttataacttgggataaatcaatccccaggttgacgattgtttgagcaatttccggacggattccggccagcaggcattttgctccgacaagccttacagcttctgatgcctgaataatatgatgggcaaccatcgtatcgacgacagggacacctgtaatgtcaatcagcacgacttgggaacggtgtttgacgacgccattaagaaggttttccataattcgtttcgcgcgttcggtatcaattgttccgacaagaggcatcacagtgatattttcaaacaccgggataagcggcgcagacagctcttgcagcgcgattttttgcagggatactgttttttcccatgagattgagtattgattaaaaatttctgtgttaatcgggctgaaaaagcgatcaatctgccagattaattccgtgctctcttgatctggcaatctcttatcattcattttcgtgtagagacgcttccagaattcggcaagtgcagtagccaaaaacttcatagacagtccgatttggaccgctcgaagcgccagttcgctgatttggctttcagcagcattttcgtccttaacagacagcagcagaatgtcgatatattctttagatatattttcatacacttggtcagtcagctgataggattcttgctcgcttaattcttttagtgtgtcagtccacagttggagcagttcattttgattttcggcaatgaactggtatacagtctggttcgacatcaaattcgcttacctcccaataaaaaacaacatattttttcgttatttcactattatatcgtttatgttttttgaaaacaaaaaaagttgctctatttgagcaacctgcaaatatgtctaaaaatcaatgagtgccaaactgatttgtaaggcttcatcaaccttatccatcatttcatcatccagatgagtaatcttatccgttaacctttgcttgtcaatcgtccgaatttgctccagcaaaataacggaatctctttcaaaaccgtagcgttttgcatcgatttcgacgtgggttggtaatttcgctttctgtatttgtgctgttatggctgcaacaatagcagttgggctgaagcgatttccgatgtcattttggatcactaaaaccgggcgcaccccgccttgctctgagccaacaacaggagataaatcagcaaaataaacatcgccgcgtttcacaatcaaatgattatcctccgctgactaagcgctcaactgtcgtttcagcctcgcactccgcaaagtgagcctcagaagaaatattcaggttgattttcgccatttccatatagccgcgtctcatcaaatcacggttgtgacgagttgttcgttcgctgacatacgctctcactgcttgtgatatcagttcgtttctgcttcgtttctcccgcatcgctacaccatccaattcagctactaggttttcgggcaagctgattttcatttcggttcttgcgctggattcagacaaaaaacatacacctccaccaaacttacggatacgactcttttatccatccagtgataatgataccattattcactcttcaagcaaagctgttttatgaattctccatttaggtaagttaattgcttatatttacctgcaataaaggatttcttacttccattatactcccattttccaaaaacatacggggaacacgggaacttattgtacaggccacctcatagttaatggtttcgagccttcctgcaatctcatccatggaaatatattcatccccctgccggcctattaatgtgacttttgtgcccggcggatattcctgatccagctccaccataaattggtccatgcaaattcggccggcaattttcaggcgttttcccttcacaaggatgtcggtccctttcaattttcggagccagccgtccgcatagcctacaggcaccgtcccgatccatgtgtctttttccgctgtgtactcggctccgtagctgacgctctcgccttttctgatcagtttgacatgtgacagtgtcgaatgcagggtaaatgccggacgcagctgaaacggtatctcgtccgacatgtcagcagacgggcgaaggccatacatgccgatgccgaatctgactgcattaaaaaagccttttttcagccggagtccagcggcgctgttcgcgcagtggaccattagattctttaacggcagcggagcaatcagctctttaaagcgctcaaactgcattaagaaatagcctctttctttttcatccgctgtcgcaaaatgggtaaatacccctttgcactttaaacgagggttgcggtcaagaattgccatcacgttctgaacttcttcctctgtttttacaccaagtctgttcatccccgtatcgaccttcagatgaaaatgaagagaaccttttttcgtgtggcgggctgcctcctgaagccattcaacagaataacctgttaaggtcacgtcatactcagcagcgattgccacatactccgggggaaccgcgccaagcaccaatataggcgccttcaatccctttttgcgcagtgaaatcgcttcatccaaaatggccacggccaagcatgaagcacctgcgtcaagagcagcctttgctgtttctgcatcaccatgcccgtaggcgtttgctttcacaactgccatcaagtggacatgttcaccgatatgttttttcatattgctgacattttcctttatcgcggacaagtcaatttccgcccacgtatctctgtaaaaaggttttgtgctcattacgacacttcctagcttttattcaatatcatttacatatcatactaaaattaaaggctaaagggaaacgatgtctaacgaaaaaaaggccaaatcatgtttggcctttggcggttatttcgatgattgtccctgcatgcttttcgctactgtcaccatttcctctttagaaagatctttagaagagagaaggtaatctacgccgtcatatgtccatgataatgatgcatccgacagggcgccgatggtgtagccgagatttaccggttcgccgttcagcgtaacggaggaggaagccttggcaatctgggctttttcctgaattaacgtaaatgatttttctcctccgtacgtcatgatgatgcgcttcccgtcttcagtagatatatctttttcttcaagcagcttgacgccaagcggcagttccagcggcgttttgaccgcaaatgtatcggaaggctttgcgcttgtggcgacatccatttgagaaagggtcatatttttcttttcatcaaatgattctttatcaaattgtttattaaattcaaagctgctgaattctactttgaccatcactttccggtcagtatccatcactttgacagatgacgggctcatatcttttttgttaaatgtgatttcttgcgtgggcagcattttgttatgctgatagtttgtttttgtttcaaatacgtatttcttttctttcgctgtgaaaactgcatccgaatcgttttgaacatcctttacgagcgattcaaacagataaacctggctgctgttgttcggccaatcgctttgaaatctgaagctcttatttaaagacggcgtgagaacgaatactccgttttcatttcgtaaaatgacttggttttggtcctttttcggattttctaaataaaccctgtacagagacggctttttgtgccagatttccacattgtatacttgaggctcactccctgtctcgatggtcattttcgcttttgctttgtacgaggtgtattctttcgccttttcatctaacccggccacaatatcttgctgtgttttttgcccgcaggcagaaagaataagaacagcaagcagtcccgttaaaagcaaaacaaagctttttctcacctttttcaacccctttttctcaattgatgtaaaaggaagaaatcgcttgtttgactttaacggtacgctcggtacacgtttaggcagaacagatgcgtaccataaaagcctcaaacaacttgtctcccttaatgcactatcaaatatatgagtggggtttccctaatatgcagactagcttgacaacctttcaatcacaacctgcgcggcagcgtattcttttgtatgagtgatcgatacgtgaacggcggcctggctcagtttcgtacaaatgatatagggcttgccattttggtctttcctaatttcaatgtcctgaaagctgagctgcctcccaatgccggtgccaaatgctttcgagaacgcttcttttgccgcgaatctgcccgcgagaaattcgttttttcttttctctgaaagctcatagtattggtcaagctcgcttcgcgtcaaaatccgctcggcaaaccttttctggcgcccagccatagaggcgatccgtttaagctcggtaatgtccagcccaatgccgtaaatcatgtatgataacctcctttgcgtacgtactatttaaatggtttgtctcataaacgtgttactatagatataccaaaatgaagaaaaggggctcggaatgtttatacggactgaaaattttcaaacatttatcaggctttaccccgttgtcacctttatattggctttgcaagctgttctctggctgtttttttcacttcctgcccattcagtcgtgttatggagggataccgtcacaggctataatctaggtgtcgcaaacggtgaatggtggcggcttatcacaccgattttgctgcacgccggtttcacacatctgctgtttaattccatgtccatctttttatttgccccggctttggaacgcatgctgggaaaagcgcgtttccttcttgtatacgccggctccggcatcatcggcaatatcggcacttatgttacagagccgcttgattacgtgcatgtcggggcttcaggcgccattttcgggctatttggcgtatacctgtttatggttctttttcgcaatgagttaattgggcaggagcattccaaaatgatcatcacactgctcgcatttgccgttctcatgtcgtttatcaactccaatattaacatgatggcccatttgtttggactatgcggcgggtttcttctttcgtttttatgcgtgcaaaaaaaagagcggcggtattaaccgccgcttcagattgttgacaaaatcctaaaatggttttcattttaggattttgtcatcttttcagcgtgattgaaaacccatgaagtctaggaaggacgagcataggagcggactttcacaggatgtgatgacgacggcgtttaggcaggacgcctgagaatttagccgttgatccacttcgcattgagcaccgaagcgcagtcctgacaacgaatgcgagggtttgccgacacgctggagcggcggtattaaccgtccgctttttcatatgagtaccactttaaaatgaaggctgcatcctcttcacctacgtccctcaccgttaactcttccatatggctcgatgatttcaccgaagtagaaatggtatacaagcggcctttcttttggaaataggattggctgaacttgcagacctgcattcgttttttcagtacaatggcggttgttctgcctataaatctagacgtcagctgaagacggtccccgttgatcgtccatgcagcctctttatacgcgagatagccgaagagcaattctatcggcagcaggatcactgacagatagccccatggctgaaagaagatacataacgggatgatcaaaaagagtgaaaaaatgacagaacggaacaaatagcgtttcaacgcgcgccgcggcaggcggcggcagttttcttccagcgtgtattccggcgtaaatgttcggagcatgtgcggaagcttttttttatgaatcattggaaagagaatggtcaaagcgccttcttctttttcccggtcgccgcctcctgcgctgacgatggacaccgttacaaagccgaaaagctggcgaatgatattttctttgattttaatggcttgtatttttcgcagcggaatcgtgacttgatgtttttcaataattccccttgaaatcaccagttcctgctctttttttatgatttgaaagttcgcgtatctaaacatcatgcccgcgatgctgaaaatccaggcgataaataaaccgataaaaatgagtaccgcataaataccgatgctggcgtgctgaaggaaggaaaatttatcgaataaccaatccatcggcagcacttcatcaagctgggaaataagtgcaaatacagcggagataatgactccgattccgccggaggtagaagcggccatgagcaattctttcgcgttcatgcgatagtgctcttgcacctcaacggacggatccaactcctcttcagcttcaagccgttcttcatcaagttcattttctcgtctttgcgcttttttcttaaagacagcttctttgatgcgttccgcttcttcaacagaaatagcagaaagaacggcttctgcctccttgcctccgcctgctgtttcaatttgcagcttcacaagcttaaagatttgctggacaaggcccgcgctcgtattcattgtttgaatccgatcaatcgatatgtatcgttttttcgtaacaaataagccttcttcaattctaaattcatcatcttcaattcgataggtaaaccttctccatttgataatgcttgccgctacaagccagatgaacagcacaccgagcgcaatggctccgtaaaaacggacagtatggtttgaattgacaatatacacaaaaaagaatggcagaatgatattttttatcgtttgaataatggtatggcataaattcaaaatgactgccaccgggtgcaggcgtttcggttcagacatcatcgtcagtcaccctcgccagacgggaaatggagtctcttagccgatccgcttcctccatctctaaagcggggatcgaatgaacggtcgcggctgtggaaattttcaccgttgccaggttgtatttttttaataatggcccttgtgacgtatcgacgtgctgaactctgaccatcggaacaatcacacgtgtcaccacaaaaatacctgactgaatatctatttcatgttcatggacttcatatcgccacaccttatgacggaccttcggaatgataaagaccgtcacaatcgatcccagcagccaaacagcgccgagcacgccgctgatccagtacggccaatgaaaataatagcttaacactgcaactgcaatgacaataagcaagcaaacagcggatatgatgatctcttgaagtcgccaaacctttaatccgtctggactgatttggttttttggctgctctctcaaaaatacctacctccctttttttcgtcgttatttatacgtctcttttacagaaaggtttcattcttaagcatacagagaaaaatggcttccgtcagctgaaagtttgctgaataacaaatcacgaacataaaaaagcccaaaacatcatgttttgggctctgaatcgatcaaattagtaagattttttctggcgtctgtcacctgaagaacggcgatcgtttgaacgctttttgtcataggaagaacggttgttgcttttcccttttccgccgcggtagccgccgccttgaccgtctctgcgtttagaagagcgctggttcttgtagcgtttgctgaccatcggcgcttcgtctgttaagcgaaccggtgtgtcgtctggctcttttgtagccattttgatagccgccgcaaccactgttactgcatcatgatcttcaagcagctcagctgccgctgtcatgtagaagttcaggttgttttcactgattgttgtgcgaagacgttcaacagtaacctgttgctgaccttctaacgcttcatcaagtgtaggctccttcatgcggtccattttgcgttttgttgtttgttcaattgcgcgaagcatgcttttctcacgcggtgtaatgaacgtcatcgccatacctgtttttcctgcacggcccgttcttccgatacggtgaacgtagctttcaggatcttgaggcacgtcgaagttgtatacgtgtgtaacacctgagatatcaagtccgcgagcggcaacatcagttgcgactagaacttcgattgcgccttctttaaatttacgaagcgcaaccatacgtttcgcctgcgttaagtcaccgtgaataccttcagctgcatatccgcgaaggttcagagcttcagccagctcatcgacacggcgttttgtacgtccgaatacgatcgcaagctcaggagactgaatatcaagaaggcgagtcagtgtatcgaattttttacgttcttgcacttccaaatagaactgctgaatgttagaaaccgtcatttctttcgcttttacttttacgtgttccggctcagtcatgaagcgctctgcaatgcgtttgatcggcgcaggcattgtggcagagaacagaagtgtctgatgctcgcttggcacgtttgaaaggatagattcaatatcgtcaatgaatcccatgttcagcatttcatccgcttcatccattacaacggtatttacattgtttaaacgaatggtgcggcggttgatgtggtcaagaagacgtccaggtgttccgacaataatattcggattcttctttaacgcccggatttgccgtccaatatcctgtccgccgtaaataggaagaaccttcgcacgtttatcttgtccgattttatacaattcttcagatacttgaatggctaattcacgggttggcgcgattacgattgcttgaatattaggagactcggggttaattttttcaacaaggggtataccaaacgcagctgttttacctgtacctgtttgcgcttgtccaatgacgtctttatttgaaagtccgagcggtatcgtttgtgcctgaatcggtgttgcttcttcaaatcccatacgattaattgctttcatgagatcagaacttaaattaaaatcttgaaacgttatagtcaaattattcaaactccttctaattgctgtttcagtaatgtcgtgatttaccacttataaaactgccctttagacaagaaggacaggatccatccgtatacaaagcccgaattactttaagttttatcttaccattacactatttgtttttcaataagatgagaagcagatcggcatctcgaatatgccggctgctgctccatccgctcccaagaatccagcggagaacttcgggtcacgatgaaaagtccggacgaatatgttcgtatcgcgaaataacctatatatattgtatcatagccgcagccggccagatatacataattttcggccggcatacattagtgtttgcatatcaggttattttatgatgcaatatgcgttttttcgcaaaatattttcttatgaaagcgggctctctattaaatctttaacgatttcttcaagcttcatacctctggacgctttgaataaaatcaaatcgccttttgatgcgttttccttcacagcttgaaggagatcttttttctcagtgtaatggctgacgcggtctttctcaaagtgtttcagggcgccttccgcgataaaagctcccagttttccgtacgtaaagacgcggtcaattttatcagggctgatcacagcgccgcactctttatggaacgtttcttcaagatcgccgagttcaagcatatcaccgagcacgagcatttttttgccgtagccttcaaggctttctgtcaattgaattgcagctttcatggaagtcgggctcgcattataagcgtcattgattatcgaaaggccgctgtctgttttgatgagttcaagcctcatcccggttacctttaggccgctcagtccttttgccgcatcctcaggcgcgatgccaaaataagcccctgcagcaattgcagccatggcgttcatcacattgtgcttgccgagtattggaataaaaaacgtgttttctatccctttgattgtaaaatgggttccttcctcactctggctgacatcctgaagctgataatcattatgcgttcccgtaccgtacgttttcgtctggcagctgtatgcattttgaagaagcggttcgtccccgatataaatcagcactccgtcttctttaagcccgtttatgatttcaagcttcgcctccgcgatgccctctctagagccgaggtcttgcatatgcgattcgccgatattcgtaatcactgccgcatccgggtttgccagtcggctcaagaggtcaatttctcctttggcgctcattcccatctccaatacggcgatctccgtattttcaggcatcgctaaaaccgtcagcggcaaaccgatatgattattgaagtttcctccagttttgtggacacggtactgggtccccaatacggcgtgaatcatatcttttgttgtcgttttgccattgcttccggttactccgatgacacgcgtgccaagctcctgcaaataagcttttgcaagctgctgaagtgcagtaagggtatcgtccactaaaatgacggcgtgattctcgggcggatttggtactgaccgatcccaaagaacagccgctacaccagcttcaaaggcctgctccacaaaagagtggccgtcaaaacgttcccctttcagcggaataaagagctgatgttgttccagttttcttgtatcggttgccactccatgaatgactgtttgttcatattgcggatttgctagtgtgcctttaaccatttcggcaatgttttttactgttcgcttaatcaagtaaggtccctctctttcttttgtatatacgggaaaaaacactgcccttttaccggcagtgtccttcttcattagaatgtatgcttaatcaattgtttttcagcgtggcgttcttttgcaagctccacaagctgttcaatcaggtcagcatattccactccggcttctttccagagcaacgggaacatgctgaaaggtgtaaagccaggcattgtgttgacttcattgatcagaacttcgccgtcagctgtcaggaaaaagtccgctctgacgagtcctgaaccgtcgatcgctttaaacgctttgatcgccatatcactgattgttgcgtattcctcatcagtcacaatcgccggaatcatcagatcagtatctccatcctcatatttcgctttgtaatcgtagaaatctgtcttcggtgcgatttctcccacaacagagcatttaggatcatcatttccaagaacgccgatttcgatctcgcggccgttaattccttcttcaacgacgactttgcggtcatattggaaagcaagctcaaacgctttttgcagttcttcacggtttcggcatttgctgattccgacacttgagccgaggttcgccggttttacgaagcaagggtagcctaattcctgttcaacctcctcacagctttctttcggagaacgagtccagtctttcttaaggaaagctgcgtatttagcctgagcaaggccaacctgcgcaaataaatgtttcatgacaactttatccatgccagctgaggaagcaagcactccgttgccgacataaggaatgttcaacagctcgagcattccctggatcgtaccgtcttctccgttcggtccgtggaggagcgggaatacgacgtcgatggcttcattttgctgtgacgcttcctgcggaaacatctcctggttcagggcagctggagaaaaagcactgcctccttgctcaaattgaagcattttcacgtttgaaacaggttcagttaaacgggcgcctctaacccattcgcctttttctgttatataaatcggatgtatatcaaacttctcagtatttagcgctttgattacagccagagctgtctgcagggaaacattatgttctgccgactttcctccgtacactaatcctagacttgttttcaatggatactccccccactacaattcatctttactatcttatcattttcaccggaaaatgatctaattatttttgggcatgctgatgttgaatgcatttgtatgtaattcctttttattttatattaaaatggcattgaaaaggagatgtgacatatgaaaaaaatcacaacaaacgaacaatttaatgaactgattcaatctgataaagaaatcattgtaaagttttatgctgattggtgcccagactgcacacgcatgaatatgttcatcggcgatattttggaagaatacaaccaaaacgactggtatgagctgaataaggacgagcttcctgacctggctgaaaaataccaagtaatgggcattcccagcctgcttattttcaagaacggtgaaaaaacagctcaccttcacagcgccaatgccaaaacgcctgaagaagtgactgaatttttatctgaacatataagctaattcgttaaacagccttattttatgtcgtcaggctctacatgaacatgaacatgagtgacatcgtgttcatgttttattttgtcttctacttcatccgccactccatggccttcttctactgtaagcttcggatcaaccgtaatcaccatctcgatatgaactgtactgcctaaatacctcgctttcacatcctttaggcgatgcacattttcgatcctgccgacggtctgtttgtaaggctcaagatcttttaaatggaagccgtctgttaaggaatgtgaagcgtctttaaagatatcccacgcagttttgcaaatgatgatgccgatgataaaagccgttaccggatcaacccacggcagcttcagctgggacgaaaaaacaccgataaacgcgccggcacttacaaaagcgtctgacctgctgtcctttgccgctgccatcagggcagagcttttaatggacgctgccagccttttgttatataaatagatgccatacataaacacagcactgcctaacgccgtccatgccgcgataagatttggcgtttccgttgtgccgcccgcaatcgcttttcctccgccgattaacacttcaatgccgactgccatcataataaaagacgcaacaagagacgaaattgtttcagcccgataatggccgtatggatgatcgctgtcagccggtctttgagaaatccgcaatcctatcagcactgctactgacgcaacaatatctgttccattatttaacccgtctgctctcagcgcttcagaatgatatagaatcccgataactagctttacaacagcaaggatgacatatgcaaaaatattgaggagcgcccctttttctccctttttcagattttctgtccgctccattgaataccagcctccattctattacatagtatggttcaaaacatgaaaaatagcagggtgcgttcaatgaagcggaatatttcgacagcaaattattgcccgggaaactttttgtcgatttgttgaatgtttgtaaattggccaagaataggactcttttcatctttacaggctattgcggacattgtatactgaagttaattgataatgattatcaatatcgtttgattggaggttggtgacacaatgacacctcagtctgcagaaatcagaaaaaaacagctcattcatctgttaatacagaatggtatatacaaaaagtcaaagcgtcatctgtatgaattgtcgctgacggagttagaaagtgaatacaaacatgtcaggagggcgccggagcatgccgaagcgtaaagtgaaaacttaccaacagctgatccaggaaaacaaagaggcgattatgggcaatccaaagctgatgaacgttatttatgacaggatcgaccgcaagcatcaaaaaaatctgcaagagcaaaacaatacataaaaagagccggtaaggctcttttttttatgactcaaacgcttcagctgccagcttgtgtatcacggcgtcatccatcggcgggttgtgaagaccggcgcgcacatcacggtaatagcgctgaagcgggttggttcgttccaggcttttggccccgacaattctcatcgctttatcaacaacagacagcgcagcgtttgtgacgatatgtttcgccgcaccgagctcgctggtcaagtgtggacgccgcaccggatcgtcatacaattgagcgatatggaaaagaaagtgtctggcattgagcagttcaagctccatttcgcctgttctttgctgtacggccgggacattcttgatcggtccattcaagctgtttggagaatactcagatgcaaattgcactgcatagtcacgagcagcttgagccacaccaagataaatcgcaggaatgtgaagcagccagccattcggcttagctccacgaggcccttgaagcagttccaccagcttattctcatcaagcattacttcgttcagtacaaggtcatggctcccagtcgcccgcatcgccatcatatcccacgtttcttcaatcgacaagccgggatcatctttatgaatgagaaacacgcctgttgtttgtttgtcctcaatccatgcggttactaaaaaataatccagagcttgtgacatcgtcgtaaaggtttttctcccgttcactgcccatttgccatcctttttgacggcgtgtgtaccgggacgccctcctcttgtcgggcttccggttttcgcttcagtcgccgccctgttaatgacggctccgttttggacttccttggcaacaaatgcaaatacgtcttcatcccagctgttgccttctccaagctccccgatcacgctcaaatgccagccgatgctaagagccgtcggagcatctccccgtgcaagccgttcttgaaacaagagcatatcgtaaacagaaatgccccctccgccatgagatgccggcaatgttaatgctgtatacccagcatcacgcagtttttgtattttctctgcaggaaaacgtccctgttcgtcatcttcagcagctgtttgctgaaattcatccgcaatccgtccgattttctccatccattgccgctgttgatcgttttgtataaataatgacatccggcagccccccagttttaattccgataaatttaatatgtattatagatttcctgccatttttccgcaactgttaaccttttgcccagtatagaaaaacacgccgttccccaagggaacagcgcgattacacaggatttgcatcccggtcttgtttcatgccgagataaatcagcatatatgtcaggtaacccatcgtcatcaccaggccgccaaagaaaaagcttgagaaaatcggctcttcaaaagcggtcactgcggccaacacaatccagctggcatacagatagatgataaaatagcggatgcccgtcttcattttatatatcatgtacagtcccacgagagaaaacaacccaagcgcgagcctgaaataaacaagatgttcaaactgaaacatgaatgacacaaatgagaatccaagcagcaatacgatcggtaaagcggtaataaagttcctcaatcgagacacctccgtcagtacctttagtataaaccaaaatatcaaatgatattgatttacgtgagctttttcacaaaaatgtcattccttgcctttagacccgaacatcccgtttacagaagcaccaccagccaacaacgatgaagaatatggcatgtatgatgagaattccaattgaaaacaatggcgtcatgcctgaaaacaacgctgtctctccgcttctgtattgcgtaaagtcagtgttcgcaaaaagcaaaaagctgccccacttgttttcaaacaacttcatgagctgaacaagtgtactcgctccgtataaaacgacaaaagaaacaacaactgctaccgcgctattgcggaacagcgaagaacaaagcagcccgaataatcccatcattacagcttcaagccagtttgacccgatcagcgccaaggtgttgaccagcaatgtctttgattccgcagtcaccgatgtgccaaaaaacaagagaccgaataataatgccagaatgtagtatgccaaatacaaatagaagctgaccatcacgactgtgattaattttgaccaaaagaccttttggcgtttaaccggacgaatgagcaaaaatttgatcgtctttttatcaaattccatcgaaacaattgttgctgcaattacgatcgttaaagcctgcagcaaaatgttcaggctcggtgtatacgataaatagccgatgaagttttcatctgttccggcactgatgacaatccgtttaatgatcaatgccatgaagaattgaaagacagccatcaggataagagaaaccaaagtgaccttccgattaaaaagtttcatatgttcattccaaattaatttagacaagctcttctccctcctcttgatgagctgttgtcgcttttataaattcgtcttccagtgactgcgtgtaaggcgtaatggaaaatacattcagatcttgtccgacaagtgatcggttcagctccggtatgttttcttttgccacctcaactacaatcgtcccgtcttggctctcagcttgatattgattgcctgtcagccaattgagcgctttttcttgcggctgcacttctataatcgctttttctgtggtttgatcggttccttgtaagctgacttccgctttgatctcacctttttgaatgatgatgacacggtcgcacaagtcttcaacctcgcgcaataaatgagtggcgaacaggacagctgttccttccatttctgcgagttccttaatatgatcccgaaaatccttcatccccgcaggatcgaggccgtttgtcggttcatctagaatgagaagcttcggccggtgaagaattgcctgggcgattcccagacgctggcgcatcccaagggaataggttttcaccttatcatgaatcgctgacgtcagcccgacacgttccaccacttcatcaagccgttcatccgctatttttttgtgcatattcgcaaagtgcttgaggttttcccagcctgtcaggtacggatagaactcagggttctcaacaatcgctccaaccgcttccatcgctttttcaaactctgtatcatgctggaatccgctgattgtcacgcttccgctgttttgtttcaacagcccgacgatgatacggatgagtgttgtttttccggaaccattcggaccgagaaggccgatgatttcaccctccatgacgtccatgctgatctgttttaaaatctgtttagacccaatttttttatcgaggccttcaatatgtaaaatcggctcagccataaagccttcctcctttttcgacaaaaaataaacagtgcccaacattaggcactgtttgtattatagcatttgttgcttccaaatgtttggttaaaccgatgatgagcgtttgctccgactgtttgttcttttcagtttccgtactgatgacaagcattgtcacctgttgtgttcaccactgtgcaaggcaatgccaagctccgattccgagtcttaattccatgccctgaacaggcaggccggcagatcgaggcacactcattattcgattttaaactactttttatcgctattctctcggggtcctttagacctatcttccttgttggtgacatccagaatatcaaggagaaacacaaagatcggaatcccgataattaaaccccaaatgccgaagaagtgttcagagaaaatgagtactgtgaaggtgaaaaagattggcagctctgttttcgccgacatcagcttcggatttaagaaataggtttcgatcgcatgaatggcgaatatgacaaggacaatgtagagcacatacattccaccgccagtgctgtaggcgataatgctgagcggaatcagggaaatgacgacgcctgctacagggatcaatccaaggaagaacaccataatcgaaagcccaaacagctgcggaaaatgcataatccaaagcgcgataaacgtcagaatacagttgacgagcgcaatgataaattgagcctcgagcaccttgccgaacgttcttgcaaatttgcttccgaaaaaagcaatctcctcataaaagaccctaagtttgctcgttttaaatttcgccatgaattcagaaagccgttttttctcaaataagaaaaacatgctaagaatgagcgccatcacgacctgcaagccgaatgtgctgatatcggccagatacgtatacactacattgaagccctctttgacatatgaactgatgttaatatctccgaagacactggtgatctcatcaaagaaagggatgctgtcaggatgatacgcaatatgtttaatctgctttaccagctgctggatctgcgccgcgacgaccggataaaacacaaagcccccgactgtaagcagcacagccagcaacatgtaaagaaacgtaatgacaacccgctggctcacgcggaagaactggcttacaaactgccgcacgacaagctccaaacgatccattagaaatgtgaaaatgaaggtaagcaatattaagttgatcatgctcttaaatagatataacacaccagttaacacgacaaagatggagaaacgccttactcccgggtgctgaaaaaatttaactaaagcggccatttatacactcctgttaggacaaacgtccttcattcaatatagtatccatttgtaaattatataacaaaaaaatgctgaggtctctgtccttaccttaataattcttaaacaattaaaaaaacggcccatggatgggccgttcttttttcagactgctgttttcatttttttcatgccttcaacagcctctatgctttttgcttcatcaaattcattttcgcttttggcaacaatgatcgtggcgattccgtttccgatcaggttcacaatggctcttccttcactcatgaaacggtcgaccccgagcaggagtgcaagcccctccagcggaatgacctgcagcgctgacagcgttgaggcaaggacgataaatccgcttcccgtcacacctgccgctcccttcgatgtcagcatcagaacgaggataatcgtaatttgctggccgatgctgaggtctactccaaacacctgtgccaaaaagacagtcgccattgataaatagatggatgtgccgtcgaggttaaacgaatagcccgtcggaataacaagcccgacaacggatttggaacagccgtagcgctccattttatccatcatacgcggaagcaccgattcggaagagcttgtgccaagcacgatcaaaagctcatccttaatgaagcgaaggtaattccacaggctgaatccgtaaagcttgcagatgatatttaaagcaacaaatacgaacaggaacatcgtaatataaacagacatcattaagcttgccagcggtttgatggaatcgagcccgaagtgtccgattgtatacgccatcgccccgaatgccccgattggcgcggcacgcataatgtagccgataattttgaaaaaaacgtgagaaaccttgtcgaagaaatcaatgacgctttttcctttttcgcctaatgccgcaagacccactccgaaaagaatagaaaagaataagacctgcaaaatgtccccttttgcgaaggcatcaaccatgttggacggaacaatgtgtgtaataaattcaatccagtcgattccctgaccgccattttgcgtgtattgtgatacatctcctttttcaagcttgctgtaatcaagacccgcacccggcttcataatattgacgacaaataaaccgataatgagtgcgagggtggtgacaacctcgaaatagataaacgcttttccccctacttttccaaccttcttcatatcgcccatttttgcaatcccgagaacgattgtgaagaaaatgattggtgcgatcaccattttaacagcgttgataaatgtatcaccaagcggtttcatttctttgccgacatccggccagaccagcccgacaatgaccccgatgatgaccgcggttatgacctgaactgttaaatttttaaacagtttcatatccttcatccccctgtcctattcgccttttgtgtctttcttactagaatgatagcgttttcatacagtctggggaagtttatgatcataacggacattttggtctttttggtctcaggtttatccttttaacacgtagcggttgaccggccggccgactccgccgtattgaacgtccaatttgatgatcccggttttttctaagtaatcaagatatcgtctggctgtcactctggcgatgccgagcgccttggcaacctcttcagcagaaagggatgcggtttgctgtttcaaaaaagcagtgacttcattcatcgtgaagtgattcaaccctttcggcagatcctgtacggcctgctgcggaatattcaggatcgcatcgagctgttcctgggacagcgtatcattcgcttcgattttttgtttatattgcttgtacttttcgagtgcctgtctcattcgctcaagcttaaacggctttaagatatagtcaaccgccccgttttgcagcatgagtgagatcgtttccttgtcttttgcagcggagacgacaatgacatccacttcaagcttttgctttctgatctcctgcaaggtcttgatgccgtcttttttcggcatgtacacatcgagaatgacgagatctggctgttcttctttaatcagcttcatgccttcctctccgtttcctgccgttgcacagacagtaacgcctttaacagttgtaatgaaatccttattgacctcttgaaccatcggatcgtcttcaatgagcagaaccttccattctttacgagccatgctgtgcttcctcccccttcattggaaaaacgatagaaaaagatgtcccctgccccgcatgtgaatcaacttctatcgtgcccgatcctttgtctatgatttgtttcactagatacaggccatagcctgtgccgccagttttattgaccgtaaaacctttgtcataaaggcgaggcatatgtgtcggttcaattccgcagccgttatcttctattaaaatagcaaggatatcatctgtttgttcgatactaatgtcaattcgtttgtcttcagattgaacggtttcaaatgagccgaaggcattttcaatcagattccccaaaagcacgacaatatcatgctgatcaacatgctcgggaaattgctgaagactgctgttttcatctatatgaacagcaatgccgagctctcttccccttctgattttacttaatagaaggcctgccgcagcgtcattttgaatcgagcggtgcagaaattcagtcacattttcctgctcagttgacgcctggaatgcaagctgcaaggctttttcagatttccccagctggatgagaccggcgatcgtgtgcagcttattcatatgctcatggttttggacacggagcgcctccacaaagtttctgacaccagtcaattcctctgccatcttggccgcttccgttctgtcctgaaaaatcgcaacggcgccgatcacttttttcttcatgacgatcggaattctgctgctcatgatcaccttaccgctgacacgaatttcttcattataaaccgctttgttccgctccacgatttcgggcaggcgcgaatccttgagaacctcccaaatcaccttgccgattagatccccctgcacttcaaagatctgtttcgctttttcattgaagatcgtaatgacgagacgattgtcaatagcgatcaccccttcattcatcgagtgaaacgtcgctgtccgttcttcatacattcggacaatctcatggggttcaagctgaaacatttgttttttgatatggcgggccagcaaaaaggaaccagcaaggccaaagccgagtgtcagcacaacgatgaaggcgatatcacgctttaaatgaagcaggatgtcagcgatccccggcagcgtttttccgacaagcaccacgcctatttggttcaggtcttgatcctttaccggataaaaagcgcgaaccgccgtgccgatctcgccctttgcttcagagaaataaatgtgctccgcaaaagctgcctcctcgtctgcaccttctgatttcttgccaatgcttgtgctgacaggatgcgtatatcggatgtgattcatatccatgacgacaatatagtctgcttcattaatcatcctgatttcttcaaccgcatggcgaaccgcttctgtttgtttttttcgcgccaaggcttctttcacttctgtcatctctgacaccgtccgggccgtattcatcagccgctttttcagctcccgctcctctgtatgctgaatgttgccgatgagcacaatgccgccgatcaaaaaggagaaaatgacgagtatataggataagatcgtgattttccaacggattgagagcttctttttgttcatcagcttctcctttcaggtctttacgaatgtcatagcccccattatccttaacataggggagggcttttcatgaagagtttgcttgcatgtctcgcactgatgatcgctggaattgcaaccgctttatttatcggattccatgatcataccggcaataaaaagattgtttatgatgacgaccaggaaggcctgcaggatcaaatcgtgtttaaattcagccacgtggttgctgaaaatacgccaaaagggctggccgccaataaattcgctgatctggtgaacgaaaaatcaggcggaaaaataaaaatagaagtatttccgaatggaagcctgtactcggacattgaagaaattgaagcattgcaaaacggcgatgttcaatttatcgccccctccacatcgaagctcggcatgctctcgcctgaatggggagtgctggatctgccgtatgcatttacagattacaacgccgtcaaaaaagggctgaacggaagcatcggcacacagctgtttgattctctaaagaaaaaccaattgaaaggattggcctattggacgaacggctttaagcaaatcacaacaaatcaagggccggtcaaaacaccggatgacttaaaagggcaggatctgcgcattatgcaaagcgatgtgattgaggatcagttcaagctgcttggcgcaacacctcatcaggaatccttcaattctacctttcagctgttagaaaacaatgtagtcgatggcgaagaaaatacaatttcaaacatctattctaaaaaattttataatgttcaggactatttgacaataagcagccacggttatctcggctacgctgtcatgactgatgaacacttctggaaggcgcaaacaccagaaacaagacgcattttgactgaagcgatgaaggagacaacggagtggaatgaaacgtatgccgaacaaatgaacaaggagcagctggaagaaatcaaaaagaattctgctatacatatttatgagctgtcagataaagagaaacaagaatggatgaagcgtcttgaccctgtttaccggcagtatgagcccatctttggccgggagctgatccgggaactgttggagctgcgaaaagattcatagttcccatctcgatacgctgtttttcgtttatctttctatcgatcggaaatataaaaagagataaacgaaaaaggagatgggtacatgtttaagcacacaaaaatgctgcagcatcctgctaaaccagatcgtccagatccattattcgctaaaaaaatgcaagaaattttaggcgggcaattcggagaaatttcagttgccatgcagtacttatttcaaggctggaacacaagaggaaatgaaaaatacaaggacttgctgatggatacggcaactgaggagctcgggcatgttgaaatgatcgcaacgatgattgccagacttcttgaggatgcccctcttgatcagcaggaaaaagctgctgaagatccggtcatcggctccatcctaggcggcatgaaccctcaccatgcgattgtatcaggacttggcgccatgccggaaagcagtacaggcgtaccttggagcggcggttatatcgtagcaagcggaaacctgctggcagacttccgcgccaacctgaatgcggaatctcagggccgtctgcaggtcgcacgcctgtttgaaatgacggatgacaaaggcgtcaaagatatgctcagcttcctgctggcgcgtgacacgatgcaccagaaccaatggctcgccgccattaaagaattagaagcacaggaaggtccggttgtgccgggtacattcccgaaagcgctcgaaaaacaagagttctcacatcagcttatcaatttctctgaaggcgaagtaagcgccgagcaaaactggctgaatgaaaaagcgccggacggagaagcctttgaatatgtgaaagaagcaaaaacgtttggagaaaaaccggagttaaaaccagcaccgccttttgttcataatacacttccgggacgcgagtaaagagacaagcccaaaacatgatgttttgggctttgattatgccttcagaaccgtccagtttggttcgtaccggatatcggggttatgtaacagatcgtgaacgaacggtttatcctcttcgtacaccgtcacctctatcgaaagaattacagccttctgatcgttttcctcgtatatgctgtcatgttcgttctccataaaatgatcataggcttctctgttttcccatacactgatgatttctgcggtgagcggctcgtctatcgtttttcgccagccgccggcctgtttgataaagccgcttatatgcgataacgcttcccactgtgactgcgcttttgcaaatgcttcagcgtttgcagcatctacttcacatatcatctttttgattagcatggctgctcctctatgatgacggtttcggcttgtttatgctccacacagagatttaccgttctgacgtaagagcgtgtgcggtgaaccgtgcctttagggatcagcaggctgtcatttgctttgagcaccgcggtttctttgtccttaaaatcgatcagcagctccccttcaagaacaataaacaattcgtctgagtcagggtgatggtgccagtcatattctcccgtaaacaccgcaaggcgcacgcagtggtcgttgacctctgagattgaaaaattggcgtgcttttctttgacttcatttgcgatggcgagcaagttttgcatcttggacattagcgaaaacccctttttcacttattgtatctcaatagcggcataaattgagaagattccaaaaaaaagcgatccagctgatgtgccggatcgcttttttatttacaggttgtctgcctttatgcttttgattagtcgttgttgcgggcgtttccgccttttgagccaatttcttggtagaattctttatcatgatttttgcttgttgcctctccgccttttcggccgatttcttgatagaattctttgtcatgattttcgctagtggcttctccgcctttttcaccgatttcttgatagaactctttgtcatggttcttgctagtggcttctccgcctttttcgccgatttcctgatagaattctttgtcatggtttttgctagtggcttctccgcctttttgaccaatctcttgatagaattctttgtcatggttcttgcttgttgtttctccgccttttctacctgcttcttctctgctcattttgttattgtctgccattttgaattcctcctttaattggtgttggttgttgtattcccgctcacaattcttttaaacaaacaaaacacattgggtatgtttccactaaaaaaagcaggcggatcgcggtgtccgtctgctttctgctattccatctctcgttctgtttctttcagtcgttcaagaatgcgcctctttttgtacagcatcatgcctgtctcggtaatgtcgtttaatgttgagcgattggcagcggcgccaaaaaccattccggcaaccggcactatctggaaaagttttttccagccaaacgtgtctcgatagcccaaaacgacttctcgccagccttggatttgagaagcgacattcttatatgtacggtcttgatcgtagtgttttaattcctgcaaaatcgatcttttgccgacaacatcagccgacgtaagctgcaggcatttcacaatgaagactcgttcttttttctcctttgggtcatagccgtatgcgactgcgatatcctgtaatgtttttagtgataagccaagcactgccggaatgtctgccgccagcgtaaacacgccgcccacaccggttgtcgcgccttgaacggttgctgcgttggttctgtttttgcccattccttccgcaatttcatccatgacaggaagaggcgctttccggatgtcctccagcgattcaaagatctcctccggcagtttcttttgaaacatcctgataatctgtttttcagatgtcaggtactgtccgcctgtttgaacaaagctgccgacctcatccaagagcttgccgatctttttctggatgaattctggtgtcagcttgtccaggagttgaaacgggagacggctgagcttttcccaaaaccagactttttgctgatctttttcccatttctctatctcttttaattgctgatgtaagtcttcttttcgttctgttggcacccaacccgcacttcccttccgttttttctactatatagtataccttcattttttcggatgcgtttttatttttcacctgcgggtaccatttttataaaaggaaaaggagtgatagacatgccttggtcgatgaaggattatcctgcttcattaaaaaatcttgagaagccggtgagaaaaaaggcgatagacattgcgaatgcgatgattgatgaaggctatgaggaagggcgcgcgattccaattgcgacaagcaaagcgaaggaatgggcggaaaacgcctctacagatgaaattgatgatttcctgacgcatgatgatgagacagaacgcgatgctgatccaagcagcggcagcggccccgagctcatgaataaagcagagcatgttattaagcataaaaaaggctgggcagtcaaagccgagggcgccaaacgtgtgtctgaaatcaaggatacaaagaaagaagcgattgaacgggcaaaggaaatcgcggcgcataaaggcactgaggtcattgttcatttagctgacggcagtgtgcagagaaagattaaaacaggatcataaaggaatatgctttcaagtgtttcgaaatgatcaggagcggttattgattggtaaatcatttatgagaggtgatcatgatgcttagctttttggtttcattagttgttgcaattgttatcggattaattgggagcgccattgtaggaaaccggctgccgggaggaattttcggctctatgattgccgggctgatcggcgcttggattgggcacggacttcttggcacatggggaccgagcctcgccggctttgctattttcccggccatcatcggggcagccatcttcgtgttcttgctgggccttatattccgcgggctgcggaaggaagcctagactcattagatacaggaggcatcgtttcgaaatgaaacgatgtctttttatatgggaccttatcacgaatccctacatatcatgttacataacagggaaaaattcagaagtgtattttgaacattttcggttgacaagaaaccgggatggtcatatgatgtagataaaataatttgccttaaggaaactctttgttgtacggcaaaaacaaacagaattcaggtgagacatgatgaacaaggacatcacagcacaatctccccgttccaaagccgtccaagatgcgcttgacgggaaaatcagaggattcagagggctgctcccttttctcggccctgcatttatagcagccattgcctatattgatcccggcaacttcgcaacgaatatttcggcgggttctaaatacggatatatgctcttatgggtgatcttattttccaatatcatggcgcttttaattcaatccctatccgccaaactcggtattgcgacaggcaaaaatctgcctgaggttgcccgtgaagaattcccgaagcctgtctcgatcggattatggattcagggcgagttggtcattatcgcaactgatctggcggaatttatcggagcggctctgggactgtatttgctgttcggcattccgatgcttgaagcgtctattattgcggcgatcggttctttcgcgatattggagcttcagcgccgtggttatcgctcacttgaagcaggtattgccggtatgctgtttgtggtcgtgatcgcctttgcgttgcagacctttttcgcaaagcctgatgccgtgtcagtgatgaagggcctttttgtcccggcgtttcatggcaccgacagtgtgcttcttgcagcgggtattcttggcgcaactgttatgccgcacgccatttatttacactctgcccttacacagcggcgggtggttggcaaaactgatgcagaacggaaaaaaatctttaggtttgaatttattgatattttaatagcgatgctgattgcaggggctattaatgcaagtatgctgattgtggctgccgcattattcttcaaaaacggcctgtttgttgaggatctcgacgtcgcatttcagcaattcggacatcttgtcagccctatgtctgcggctttgttcgggatcgggctgctcgttgccggtctatccagttcgtctgtcggcacactttcaggcgacgtgattatgcaaggatttatcaactaccgcattccgctgtatgtacggcgttttatcacgatcattccgccgatcttgatcatcgcgtcaggtgttaatccgacgaccgctctcgtactgagccaggtcgtgctgtccttcgggatcgcctttgccctcattccgcttattatgtttacaagcaataaacggatcatgggatctctgatcaacgccaaatggatcacagtggtgtcttggctgattgctgtattgatcgttgctttgaatgtgtttttaattgtagatacgtttcgataaaaaaaccggcttctaaagccggtttttatttttccgcaaaagctcattgataccctttttgacagaaatttgttatgatagaagaaaaatcggagttttgatgatgtcagtatttattctgttttatttgtggattgttcctattgttatcggcattttatgttctgttgctgcccataaatccaagggaaaaatgagagtcgcgcccggcattgccatgatcgtgctcagtatcatttccctaatcacggcgtttacggccggacacacaaatttccacgtgtttatcggcggcatgtttttattcggcaccttcttggtcggttctgcttttcctttcttcttcgggctgaagaaaaaagaaaaataacctattatgagaagagttctgtaagatttgataagaataagcatgcaaggacaaatgcatcttcctttgaaacaagatgcatttgtccttttgtctgtttcgagtatggcgaaatcagttcctaatacatataccgatcattttatgaattcaaacatgctgaaaatacatttgtttccaaaaaaaaaaaaaaaaacaagggctcttagggcccctgtttttttaaaataaccgtttcaaacttttcttcagtgacggcatttcaaatttttggttttcgaagaagtttttcagcatgtacttgctaaagcctttcgcctgcccgtaggtgattttgccaggaagcggcggttcgtttccaatcatgacatccactacgaccggttggtcagagtgcagcgcctcatgaaaagccggcgcaagctcttccgctttggtcactttgatgccctttgctccgcagctttctgcaaatgcggcatagtcgacattttgaagttttgtgacatagtcgatattgcctttgacctgctgctcgtactcaatcatgccgagattttcgttgtttaaaataacgactgtgatcgggagcttatatttaacggcggtcggaaggtcctgcatgaccatggaaaatcccccgtcaccgcagacggcgatcgcctggcgttccggttcggacaagctcgctgcaatcgctcccggcaggccgcagcccattgtcgcaagccagctggaaacgatgaaatcctgattcgcgttcattttgaaatgacgcgccatccagactgtcacagtgccgacatctacagagagcaccgcatcatcggctgccgcttcctgaagacgggccacgacctgctgaggtttaagcggtgttgttgcctctgtctcatctttttcaatttcgttccaccaatgctgcatatgttctgtgcaggcattcaggaatcttctgtcttccttgcgttcaatatactctgtcaattcgcgcaaaccgagagccgaatcacagacaaggcccgctgtcaccggataccgttttccgatttttgccgggtctgaatcgagctgtatcgccggcgtgtcatcaggcaaataatcacggtacgggaatgacgttccgagcatgattaataaatcacattcctccattgcctcgtaagccggctttgttccgatctgaccgaggttgccgagaaaatgtgggtgcttatcgggaacaacaccctttgccgggagtgtaacaacgatcggagcggcggctttgtccgcaaattctaagagctcccgtttcgcctttttcattccctgccctgccaggataatcggtttcttagcgttattaatatattgggcgcaggtgacgagctgttcttttttcggttctaggttcccttcaatatacaccggtgaagtatacacgggctcccgtttgattttctccgcaaacaaatcatctgacacgctcaataccgcaacgccttttttgctgtaggcggtcctgatcgcctgatttaagagatccggaagtgattccgcgctatgtacctctctgttgaacacggccacgtcctcaaacatttgctccagcttaatctcctggaaatagtcccgtccgacttcgccagaagaaacctgtcctgcaatcgccagcacaggggcgccgtcggctttagcatcatataaaccatttaataagtgcaccgctcccggccctgcgattgacagacagactccgatcttgccggtgagttttgcttcagccgcggctgccagtgccgctacctcttcgtggcgggtttgaatgaacttcagttgatttctttcgtgtcttaattcttcgataaactcatttatactgtctccggggatgccgtatacatgatcaactccccattgctcaagcagctctgtcattgcttgtcctgcagttttgtgtgccataacgtatcctcctttttccttttttcaataccacaggagaaaggctttaaaacccggagacctgaatcacttgcccagtcttcttttcaacaggtcgatcgccgcgagcaacccgctatccttgacggtgacatttacatcttgagcgccgttcttgaaatcattgatctgcctttttcgattcggcaccataaaaagcggcaaacgccccggggaaacccactttaatcccgctgtctctgtgccgtcagccattgcttgtccgcctgtaatgcttccgaaaaacagatgctgttcatcttgaaactttggcctttggtaaacacctattttcgcagaaagcgctgcattgtatcccgtttcttccaatatctcccgcactgccgcttcctcagccgattccccgggatcaaccctgccgcccggcaaatcccatagagggacatcttttcgtttcaccagcagaatttgctgactttcgttcaatacgatcacaaaagcaccttgtgtatacacccccatacctccttttcccgctaaaaaggaccaaggtgattcccttggtcctagagctttactttttaaaatgatacggcagtgtggcaaccattatgtcctttttccagaacagccggactctgaggaggaaggccgattggttgtgaaggatggtgtgccagcgttttttcgttataaattgcggaaacagcaccataacggaaaactgctccttcttcgcttttgcctcaactgtttccaaaaacttatcaaacggatggacaaggcttctgtaagaggagtgaagcgtcacgagacgcactccgttattaagctcttcccaacgtttttcgaatttcttttcctgttctctgtcaaatgacacgtgaacggcgatcacctgatcggacagtgatttcgcatagtgaatcgatttttgcacgacggtggtgacaccggccacaggcacaatcacaacggtgcctttgatttcttccggctctttgtctacgatgcgaagctgttcaccaaccgcagtatagtgatttttaatcgcaaaaaacagcaaaacgacgataggcataaagattaacacaggccatacgacattaaacttcgtcacaaacagaatggatagaaccataaatgatatcagagcgccgcaggagttgatcagcatttttccgatccagccttttggtttttgcttgatccatttcatgcacatgccggtttgtgaaagcgtaaatggaataaatacgcccacagcatataacgggattaagtgctccgtctgtcccccgaataagataatgagaacaatggaggcaaagcctaaaaagataatcccatttgagaagcctaagcggtcgcccctgactgtaaacattcgcggcatatactggtctctcgccaggttgaaggcaagctgcgggaaggctgagaatcccgtatttgccgcaagaaccaaaataagcgatgtgacaccttggatgacatagtagaacacattccgcccaaaggtttcggacgcaatttgtgaaaccactgtttcatcaggtttcggcgccgtaccatacccgtacgcgagaaccgtgatgccggaaaacagaatcgccagcaaaatccccatcatcgcaagcgttcttgccgcgtttcgcgcaggcgggtttttgaatgcaggaatcgcattagaaatggcctcaaccccggtcaacgctgagcatccggaggaaaaagccttaagcagcaaaaatagcgtaatgccggctacaggtgtgccgagcgatgtatgatgggctggctggtctatttgtcctgtcataagtttaaacaacccgactgcaatgagaaccaaaagcgccaccacaaacagataaaccgggtaggcaagtatggatgctgattccgaaagcccgcgcaggttcaaaatcataatcactaacacgagaaaaatagcgatcggcacatgataatcatgcaatgcaggaaaggctgacgtgatggcatccgtgcctgcggaaatacttaccgctactgttaaaatataatcaacaagcaatgaaccgcccgcaatcaatcccggtttttcaccgagattttctttagaaacgatatacgccccgccgccctgcggataagcgtaaataatttgcctgtatgaaagaatcagtgcgagcagcaagatgagaacgccaaccgcaatcggaatggagtaccaaaatgcggctgcactgattgttgccaaaatgattagaatttgttctgtcccatatgcgacagatgacagcgcatctgaggaaagcatagccaaggcttttaatttcgtcagtttttgctctccagctgcttgggattttagtggtttcccaatcaaaaaacgtttgattgaatgatacatcgatgtcttccccttttaatttctcatttttcaattaaaacaataaaacatccatcagtgtcttgctctcacatgttgatgatagtcctttctgctatgatgtctctgtatgcgatttgcattcaaaaatgaacaacaaaaaacacagaggcaaacggatgcccctgtgccataacatcgaacacaggtttcattcatctcctctcacgaacgcttacgaggttagctgacggattcgggcatatgagagttagccctacctaaaaaggattcaccccaacggcaaaaagccgttctattgggtcccccgctctgatttcagattaagcgatttgttttctaaaagagatcatactcccgttcccgcacgttgtaaagaggcttattggctgagagaaaaaaataaaatgacaggttccacaaatggaatttacttaccaaaaataaaaaaacagaggctaaaatcgcctctgttttattctgtatctgtctttctttttttgcgtcttacggcaatccaaatgaacactgccgcaaccaccataatgagtgccagcacaccaatatacatccatttctggctatgatcctgtgttggttgttctgcatcggaactgtttgtttccgatttgagctgctggtggtttgtaaacacctgctggctgtttgtttcattaaggacggttgccgactcatcgttgctgttcagataactgatgatctcttttgtgacagccgtgccatctccttttgacggtgcaaagacagccattgtatagcgtgaatcccaaaccgatgcttgggtaaataccacttgttttgtcgtctcattcagcatctcgaaactagatacatcaaacgagccgttcttttcctgcggcacaagcagatctgatgatttctccttcagaagagaaaattgattgatccctcctatgaaaatgaggtttcgtcctttcgcatcatttgctgtaacgtcagatgatttctttaccgtatatgaatgctgtgcttcgttgccaaaggattctgttacgagagaaagctcctctagcttcgattggcttacggtgtcaggaagcacgattaacgttgtttgatcctggtttccggcgtaaggcagcggccactcttgaaaatccgctgacggggacatgcctttgatggcgtatgataatgtactgtttttatcgataaaaacccacttttcttcatcagtggtgttacaagggttgttttcctttaaaccggtcgtgacgaactgaatatcaatgtagcggtttttttgcagcagcttagggtccactttcactgtgacatgatagaatccgtttttatcttcttttcctaattcatcaagccggaccgagtgcggctggccgttgatcatcactttcagttctgcagcctgagaggctgactcgttttcagccgttgaggcttgaatcgtttcagactttttcagtttaagcgacagcttcgccgattggttttcatctaaaacagccgaagccggataaaaataatgtgctgaagatgttttgtcggctccaattgtgatatcacccgctccaaaattctcaagggtcagcttatcgctttcttttttttcagtctgctgaagcttgctgattgaaagtgtatcgccgctgagctggcctgtatatgtctgatctgtcatcacgctgattttttttgtgagcgcgtcctcggacgccgcttgcgcaaacagaaccggctgctgtttgccctctgctttcagcacccgctccgcaagcagaaggttttctccttttgcctgtagcccggcttgtttcaacagttttttcactttgccgttccaatgcttgtccacgccgataacaatcgtcggcttatcgatttttttcagttcagattccgtgacatacgcaatactgacactgctgtccaccgttttcaaatagccttctgttttaacagcagcttctatttctgctgaacttgggttatccggaatgacgatagctgtttcttccgctgtatttccagattgggcgaaaggatacggataatggtccagcgacgttcccttcgcttcactgctgtcagcaagtgtcagccggctgtccggataaattttgatccagttgcctgatgtatcctgtctgacgcacacgccctctttcattacgccgtagaatttcagcgatacgttgtgatagccttgcgcagactggcttttattcagattcagcttcactgttttccgtttggaatcaccatcaagctttaacgtcttgaccggttcatcatcaatgacaaccgttaacgatgatggagaaattaaaagatttgatgcctcgtattcgattaccaattgctgattgcccgaagaggcgcctgccgggatctgatacgtcagctctgcgctgtcttttgatccatacagtgtaatcagctcgcttgtcagcacctgctgtttggcttgttcttggctgcttttcccaaggagcgaaccgctgacctgtacgtctttggcaagagccgtttgtccagtcatcgccagcagcatgaagcttgtgagaaaaatcattatttgtttcaaaaaggtcacccgcttttatgttgattgtatcgttctgtcttgtaccatttgacctcttgcttgaataaacggtgcttgatttctacgaataaagagtagataacaagcacaatccatgcctgcgagtatgtgaagtacatgagaaatacgataaaaaagttttgcttgttcatttctgttttttcaatgctcaacgtaatcatgacctctgtcataaataagaaaaacgccaaaatccagagaatcattgccaaaaatccaacagacaaatgcaaatcataaaacaaattcactacaaaaatcgcatttgacatgatcacgccaaagaaaaacaggaagtacgtaaagaaaaaataaaacaaatcaaagataatccgttttcgtttcagcttaaaaaactgcgccaaaaatttgagcacgacatattgattgccgcgcgcccatcgggtgcgctggcgccaccataccttccatgtttccggttcctgctcccacgtgatggcggcagggaaaaagcggatgtgatagccgagattatatacccggatggtcagctcagtatcctcagcgagcgctttgtcatcccagcctccgagcttttcgataatgcttctgcggatcgcgaagttggtgcctgggatcgtggcgattttgaaccacttccatctgcctccctgggccatccactgaaaacagatcgtttcgatattaataaacctcgtcagcagcgtctttgccgcattgatgacgcggaatttccctaccacggcgcctgccttttcgtcattcatcaggccgagcacgaggtaatacacggccattttctcaggcgtgttgtcggcgtcatacacacagatcacatcgccgttcgattcggcaaaacccgagttaagtgcagaggattttccttttcctgcatttggcggcttcgtaatcaccattttgatgaaatcgtatttctcggaaaattcattgacgatatcacccgtccggtctgatgaattatcattaacgacgataatctccagccggtccttcggataataaaggttgaccatggccttcagcgtctgccgaatcacaacctcttcgttatgcgccgggatgaggacgctgaccttcggcagttccttcatattttctctccacttcgggatattccgttcgaaggtcatatagtggcgaaacccgccctgcatgaggaacatgtggtagagaagcataacccatattaaacttagcgagataaagaacagcgtattacccaaggcttcttctctccttaaaaattcgttttttcaatgtggctctcaagtaaaacgtataactgacaaacatgatgacaaataagagcacaacagcggagagaatccataacgccttttccagaggggtttgccggtgatgatcgaaaaactcgtaaatggggcttacgccgtttttcacctgaatcgttccgtcaccgcttgtatgaatttccactttgtctgttttgacggtttgtttcgttttctttaaatcaagccattcactgtctggaatgcgttccatctgatcaaccagctcaggcagatatttcatcccaaggtacgggtgataaaatcctccggctactccgccttcaaaatcaatcatctgggagatatgctcctccatctcaccgagcgggttttgcttcgatgtgtcgacaaagccgatcgtttccggataaagcgtcattccgtgcagcatcgaaggagcagtcacaaacggaggtgcaccggatgttttccatgttgtgctgctgagctggacctggccgaaaatgcttgtaaaatactgcgaggcgatttgatagccatattcggacatcgtgtaatgcggcgcttcaaacgccagcgggtaaagacccgatgatgtcaaatcctcaatggcacgcgtcagtttttgttttgtatacgtttcttccttttcccgaaatggttcaagatagctgtgataggcttgttcgttcgggaagtcctgttctttctccaaaatggacggggggtcttcggcatttccggatgtaatcggctgatccgcctttgcatcccaaaattcaaatccctctcctgtttcactgtagcgataagcgtgagtatagccgtgaactatgatactgccgcccatgctttgcagcttcttcagcaccttgaccatcttcggttgattagacaaatacactttgtcgcctgtttccggattcaagtaaaccggaatgaccgccaggataaaaggaatatgccgcttatgcaggtatgtaccggcttgaagcagcagtttttcatcagacatcgggctgatatcctcgagacgcaaatacaataacgtcgtccccgccttctctccgaaagcttctctgagctgtttcgccacgatcaaattgtcatttaacaaatttgttaatccaatgtacacattccctttttttgttttccatataaaagaatgcgttgtgccttcatccgctttgaaggtgtaaagcgccgttcctttcaggcctgatacactcagcacgttaagcccgctttccagagacacatcggccttttctgacctgctgtgaacctgaaacacattttctttgcgggctaatgaaagcccagaaaattggctgatttggcctgcgttatagccaatggcgacaaccggttttttcacgccgctgataagagacagcaatttttggctgagctttcttttcgtttggccgtaataaatcacatggtctttccctttgaaatccgacgcttcaacgtctgaatcttttttgactgtcacatgggatgtaaagtggcccgcaagcaaatcgagcattttgacttgtgacgactctttgccgtccaaggttgagtagatgatgagaatgccggcatcctgatctttcgcttgcgcagaaacgggaaaagacgcaatagctgaaaatagaagcatcatgacgcatagcaatgtgattcctttatagttcattcatcatcatctcgttttccagttcttctaaaaattgatcagctgtttggatatcgttgcggtagggcaaatagcaaacgtggaacgtaagcgacacatactttccattttccagctgatatgtatccaattgtttcttcagcttagtcagaacggccggcatatgttcagcaggcgtgtgcgtcagcacgatcccgatacgctcgtcagagggacggaatttcttatccgtttcccgaacgcttgtcctgatttgctgaccgacatattggaagaggcggtccgtttctttttcaccgtacaaagacttaaactctttgaaataatgcatatggagcagcaaaaacacaaaagaattgccgtagcgctccgcccgcttgatttcttctgaaagttccagcttcatcctttgcttgttatcaaaaccagtcactctgtcaacagcaacatagcttttaatttcggattgaagccgtgtcattgagcgccgaagctctgctgtaatatcgtggattcttccagaaataaaagaaaacagcaaaagcgcgattccccacacgacaagcattcgcagcccttcctcagccggaaagagcgatgtctgtccagtctggaaaaacatcattaaggtgccgagaacaaagagtacgattaaggtcactgccagcgcgtaaatcgggccgaaccagatgcctgcggcgatgacgccaaatgtgatgcaaaggatcagagcaccttctgattgctgggctgacacataataaataaacaaagacagggccgcgatgagccctgaaaaataagcaaataatttttgtgattcactgaatgatattttcattaaaaagcttcctttcggctaacagcggcagcagattgtcaaatgaatgcgtctgagtgccgctcatatagcctccataatacgatttcaccggatcatgaatttcaaagtcattcattctatcatatatggctttgatgacagaactgttttcatgctgttttgtcaaaaacaatacggctaaggcatatacggatggagactcatattggacggcaggctccttcgtatatgccgaataccgcccgtacagctttccgtttttctgaaattcctgcttgatccagtccgctaaaacagatgctttttcatccccttccggcaaatgccaagcagcgtaaagctgatcaatcaggttgatttcactatcatatgtgtattccttcgtctccgagctgtatgtcttcggcagaaagccattttttaaaggagctgaatagagaacattggcattccgctgttctgtttcttcgtctatgattccattcttctttaagacagctaaggcatcaggcatgacgtatgaaagcgtcacatcctttgaagcggcctgtgagtcgtaaaagtctgtaaaaaacccgttgttcatattgtatgtcttcaaagacgtgccgatatccctagccgtttgcgcgtagtcgctgcggccccattttgcggcggcttggtcaagagacagcataattctcatatcatctatcagcgcattcgtcccgctcgcttggccattttgaatcttccacgtcaccaagtgattgctcatcagaaatgaatcagtcagatgctgatattgatcctggaaatgtggtgcgtcatttttgctgagcagaaactccatccacagtccgagagattccgacaagtaagaaggctggtctgaaaaatcggttttgatcagccctttgtcattcattaaattgtgatagatgaaatattccgccggctggagcgggctggcattcacttctgtcgccgactgattttgggtcttgtttccagcttcagcacaccctgcggaaagtccgatagataagaagaataagatgacagcaattagtacatgcctcacaggcaaatccccctttgtcgcctgaagcaaatcagacgctcacaaatagttatagacgaaaatatgactgccatgttacaaagtacatttactataaaagaaaaaaaatgcagattgctagcttttttttccctttttgaacattaagaaaacaggacctaagtccaataaaaaacctgtgcgataggcacaggtttttttattatttatccaaaccgagttttttcagctgttctgccagcgcgttgttaatcggctcatctttattttgttttttcatataagaggatacgtcccgtttggtagcacgcgctttgtctttgttttttcgtttttcaaatacagagagcttttcacggtgaccgcacacacacgcaaaggtttggccctcgccttggccgcgaagctccattcttttatggcaatttgggcagcgtgcgtttgtttttcgggcaatcgtttttctgcttccgcattcacgatcttggcacacgagcatcgtcccgcgtttgccgtttactttcagcatcattttgccgcattccggacatgccgttcccgtaatgttgtcatgtcggaaggtttggctgctgtttttgatttcttttaccgtttggtgagcgtaagccttcatatctttaataaaaacagccgatttcaatttgccggccgcgatcgcagacagcttttgctcccattctgctgttaaggccggtgatttcagatcctccggaacaagctgcaggagctgttttcctttagatgtgataaaaatatcttggccttttttctcgattaaaaagctgttgaacagtttttcaataatgtcggcacgcgttgccaccgtgccgaggccgcctgtttctccaagcgttttgacgaggcctttttcttctccctgcataaacgcgcttgggttttccatcgctgacagcaaggtcccttcattaaagcgggcaggcggcttcgtttggccgcttgtttccgttaacgtgcggacggcaagtgtgtcgcctttttgaagcgcaggaagtgtctgatctctgtcatcctcctgctcatcatcctcttccgccatatcataaacggctttccacccttgcgactgcacggttttgcctttcgccgtaaaggtttctccgccgatttctgcgatgacctttgtttcctcatattcgaatgcaggcattaatacagccaggaaacgtttcgcaatcaggtcatacagctttcgttctttatcactcagactgctgagaacgagcggctcttcggtcgggataatcgcgtggtggtctgacaccttcgcgtcattgacatatcctttatgagatttaatgccgcgttttttaatttggctgacatattgggcatacggttttacttccatgccttccagacggtcttttaacgtcgggacgatgtcactggataaaaatctagagtccgtccgcggatatgtgacgagcttatgctgctcatatagcttctgcaggacagaaagcgtttctttggcagaaaaaccgaagcgcttgtgggcgtcacgctggagctccgttaaatcataaagcgcaggcgcaaagctttttttcgctgtttttttcagctcagctacgaccgcttgctttccttggagattttttagcaaacggcttgttacatcttgattgaacgttctcgtctgctttgatttcttatcctgccacgtcagcgtcatgccgtcgactgcagcacgtatgccgtaatacggaacgggcgtaaacgcctgaatgtctgcctcgcgctttgcaatcatggcaagcgtcggagtctgcacacgcccgcatgagagctgggcattgaattttgtggtaagtgcacgggtggcgttgatccccacaatccaatccgcttccgctctggcgacggcagaatggtacaggttttcatattctttgccgctgcgcagcttttgaaaaccttccttgatcgctttatccgtcacagatgaaatccacagccgcttgattggttttcggacattcgctttctcaatgatccagcgcgcaacaagctcaccttcccggcctgcgtcagtcgcgatgacaatctgattgacgtctttacgggtaagctgggatttgactgcattgaactgctttccggttttttttatcaccacaagcttcaagggttctgggataatcggcagatcctctaggcgccatgattgaaattcttttccgtagccttccggatcagcaagcgtcaccaaatggcctaaagcccaagtcacaatatattgatcgccttcgagataaccgtttccttttttatggcacttcagtacccgggctaaatcccggccgactgaaggtttttcagctaatacaactgtttttgacatgcttgatcacttctctttctttcacgctcatcctgttattataacagacttcgcgcggcactctctaaccgcgcccgtttttcgtgtcaatttctgagaaaatgacgtgagtgacggtttgcgcgtagggcgatgttttgttaatgaaatcttctaccgcttcgaggctttcggcattgattttcagcatatagcaggctgcacccgcaatccggtagcaaaattcaatattcggcaatgtttgaatatagcttttgaaccgctcataatccgcgtttttaacggttgcttccacaatgcaggaaacgggaagccccagttttttctggtcgacctccagcgtgtattgcttgatgatgccaaacgattcaagctgtcttacccgttctgttacagatggaggcgacagcttaatttttctgcctaattccctcatcgacaaacggctgtccttcttcagctcctcaatgatattcagatcaatctggtcaagtttcatttcaacatccttcttttttgattttgtacacattatctcgggtatttttgtaaatgacaagtacagttccctagaaaaggcatgtaaaaatgaatgttttccgaacattttttgaaagctgtcatatgcccccccggattgtttatagtataaaatgaaaacgtgtccacaaggagggcgatttatgctgcacacgccgatcggaagacttcgcacgatgggttttattgaaggaatgtcactcttaatcctgttgttcatcgctatgccgcttaaatattgggcaggccttccgcttgcggtgacaattgtcggttcggttcacggcgggttgttcattttgtatttgcttgtcttggcttatgcaaccttctctgtcaaatggccgctgaaatggtcagctgccggcttcatcgccgctttcgtcccattcggaaattttttgtacgaccgcggattaaggaactataaataaggaagcgcaaaaaggctggatctttatgatccagcctttcttattaaaaccactttgtcagccacgcgatatagtaggccccgggaataaacatgagctgggcgaggagtgtgcccgccacccttgatgtgaccattgtgacagaggtccattttaaatagatatagcttcgttttccttttgccacatcatcagcaagaacggataccttaggatcaacaaaaatagccagcagcatcgttgcaattccgttgatcaaacccgaagccatgacggctgtcgtgctgcgctccggcgccaaaaggcctgcgtataaagccgaaagcacaccaatcgtataaatcgatgtgatcagcatgttgatgacaaacaaacgcttcggaatcaagcgcatatgaaatccttttacatatgaaatggacggcagacgcaaataggaaagggcatttttgaatccttgtttcgagaatccctttcggaatacttgaaaaacggagccgccgccgcccgccaagtgaataatcgcccgtgaaaaaagagcgacaaaagacgggagcaggataatgcccaaaatggtgccgactgtcgatccgaaaattaaaaagcggaactgctcccctacaatcgccagtgcgttttttccagcatcatcaattaaatgcccagtaaagggctgctgcaccatattcgacattctggatacgatgaccatgacattaaacagagaaagcgcggacgcaataaatccaacgcgagctccggaaagccttgtcgcataggctaaggtttctatcgagtgaatcagcaataaaaaacaaaaaataaaaagtacttgtgttgtaatgacatgcacgttattcttcctccaatttcatcctagagataagactggaaagaagacaaggaggtttcagtacgatgtgttttttgcaataaaaaaaccgtccggcgtacgccgggcggtttgtcttattcttttctatacgcaaataaagattatatcatccgccaagtcaggcgggttagattcataaagcattgttccgaagaatcattctggaaagtaaacaccatggaaatttcttgaacacaagacaacgaaagccctacctctcaatcgtcactgcggctccgaagccgcgccggtgtgaattgtaaaacaaaaaagtcttttttccatctcatcgttaggggcgatttgttatgaaggaaaagaataagggcagctggttatgctgcttgggaagcggtaagcttctctctcaaaacagaaaaaagaagtttactttcttttttatttgcttatttttcttactagctattcataataacatatcgcccctgaaaacacaaattttttatagttcgagtgagaccggtgttttctccccggcattcattaatctgatatcctccggttcaatttcaagaatcaccagattcggatcatccttgccgtcaaaccagcgctctaatttggaactccatattttgtccttgagttctgccgaattgttgatctttgcttttccggcaacttcgacatatgcgtcgccaaaaccttcacaatcatagcctaataaaatgtggacattggggttgttctcaatttcttccgctttatgagtttccttgcttgtcggtgtgtaaatcgtcagcccgtcatggaaaaaagtcatgtagcgggaatgcggtttgcccttttgaactgttgcgagcgaacctactttatggtgatctagaacatcaagcactttttgtttaatgtcttgctgattcatctcgaatcactcctttttaacgtctccgctgttacttttccacatccggggaagatttaaacaagaaagtgtgctctttatttttcgccttcccattcacgctttaacagactgtagtagacgaggtcgtgatgcatgccgtttacgtataagccatcccgtgcctttccttcctctagaaacccgatccgctccggaaccgctctgcttttttcgtttccgacagccgcacagatcgccacacgattcagctcaagctcttcaaaagcatacgtaatgagttttcggcaggcagctgtaataatgcctttcccttcaaattctttggcaatccaatatccgatttccgccttacgattcacttgatcaaggttatgcaggctgatcatgccgcataggctgccgtcataaaggagacccgcctcaatgccgttcaggtcggcatactggcgccgccaatctggaatgattgtttctcggtacgtgtcagcgctgcttggattttccgcaaaaaacagccacttgccaagccgctgctgattttggataatgagttcggccagccgctccgcatccttcggctccaataatcggatggtgatgtgctcatttaccttgcaagtgaacattgcctcgccctctttccttttttacccattatagcgatgattctgtttttttcaatacaaaaaggatgggctgttaagcccatccttatattcttggatcggtaaagatatcatgtttatccgtgctcgtcgatgacatttccgtcacgacggcaccttcttccccggcctggaaccaatgctttgtgtttggtggaatcgtgtattgcccgcccggttctagctcaatttcgtgccagaccgtatagtgttctctgtcttcctgaggagggagaacttttggaagcggcgttttttctccttctacgtaaagatacacttttccgtagcggcagcggaaggtctcctgcttgccttcctggccgtcgaccggtggatggcggtgttccgggcaagtctgtcccggaaacagcaccaattcctttgaacaataacggtctgtattgacgtagacgaagagctggagcccgacttttctttcttttcctaagccgtaatccatcagctggatttggtctacttcctcgtccgttaatacaatccctgctttttgatagtagctgttcacttcttctttcgtgatgcccatatgtctcactccctcttatgtcgtcacaaagtttccgccgttgacatgcagggtctgacctgtcatgtaagaggactcatctgatgccagaagcacataacagccgacgtgctcaacaggctgtccaggacggcccatcggcgtatcttgcccaaattgagcaactgtttcttcagggaacgtagctgggattagtggcgtccaaattggacccggcgcgactgcatttacacggatgccgtctttgacaagcgcctgcgccattgttcttgtaaaggcattgatcgccccttttgtcgctgtataatcaatcagtgtcgggttccctacgtacgggttgatggatgtcgtattgatgatggcgctgcccggtttcaggtaatcaattgcttttttagtcaaataaaattgagaataaaaatttgttttgaatgtgcggtgaagctgttcgctcgtaatatctttgatgctttccttcgggtgctgttcacctgcattgttgacaaggatgtcaaggccgcctagttccttgaccgttttttcaaccgcttcattgcagaattcctcttcacctacgtcaccagcaatcagcaggcattttacgccttcttgttcaacacgtttcttcgtctcctcagcgtcttcatgctcatccttatacacaatggcgatgtctgcgccttcctttgcgtaagcgacggaaaccgcgcgtccgatcccgctgtcgccgcctgtaataagagctacttttccttttaatttgtctgctcctttataatcctcgtactcatacaccggacttggattcatttcgctttcaattcccggctggcgactttgagtttgtgccggcagttcttttggataatttgccatgatgattctcctcctttgttttcatgtctatttgttgtgtacctcacacactctttggataaacatggcttggcaccttcgcattgctttatcagaaaaatgtttcacatggaacgctgagaggaaattaactcaaaaagggggttggttgctgaatgattaacatgctttctagaagattcagcaggccaaagggcgtcatcggcatgattgccgggtacatcatggctgctgaaaatcaaacactgaatcagtggacaatcaatcagctgggtatcacgcgcggggacagcattttagaagtcgggtttggcccgggatactgcatgcagcagatgctgaaacgcgagaaggatgttcatcttcatgggattgatgtatcagaggccatgctgaagctggccgcccgcagagtgaaaccaaagggcgtacgcctgatacaaggaagcatcgagacatttcctctccccgcctcgttttatgataaagtgatttccgttaacaactacaccatttggaatgaccaaacaaaaggcataaaacagatttatcgggcattaaagccaggcggcaaagcagccattacgatgcagccgcgggaagcggatgccagtcctgagaaaaccaaatcatttggaagacagatgattgctgactttaaagcagccggcttcgaagacattgatatacaatttaagaacattaagcctgagctttccgtctgtgcaactgcaaagaagcccgccacataaagtggacgggcttcttcttttatgaatgtacagcctgattgcgcaggacgtcttttttcaccttgccaaggttgtttttcggcagttcgttaacaaattcaacttcaggtattttgtaagcggacaggcgttctttacaaaatgcgatgacatcctcttccgtgatgcgctggccgccatttttcacgataaaagctttcggtttttcaccgtaaagcgggtcaggaataccgaccacagccgtttcaaggattcccgggatctgctggataacttcttcaacctgatcaggatagacgttatcgcctccgtaaataatgacatccttgtagcgtcccgtgatgaaaataaagccatcttcatctacatatcctgaatctccggttctaaaccatccattttgcagcactttcgctgttgcttcaggattgtcttcatagcctttaaataagaatggagtatgaacaacgatttcgccgatttctccttgaggaagttcttctccggtcagaggatcttccactttgactttaacacctgccacaggttttcctgcagatgccgctttatccattcccatatcaggcgtccatgtgctgatgccccaagcctcagtacttccatagccatgcgcaagcggaatgccaatatcaagatagcggcttattaggctgctcggcacttttgttccgcctgtcattaaaataacaagcgaagataagtcagtttggtgcttttcccacgcctcaagcaaatacgtgtagaacacaggaagagccatcacggtctgaatcttctcttcttcaatgaccttcagcatgtgaacaggatcttgatcctttgtaaacacaaatgttgtttctgcaaacgttccaagcatgatgcaaatgagcgcactcgtatgataaatcggatggcacgcgagaaaacgaaggcccttcatacgtgctattgagctgttggattttttaacgtatctgtatatgccgccatgtgtaatcatgcatcttttcgggtttcccgttgttccagatgtaaacatcagaagtgctgtatcatcaggtgaaaccatttccgtctctggcaaatgatcaggacctgcaaacagcgcttcaaattcagcagatgtttcgtaagctgttcctgtttccattgttacacacagtgaggacaattcaggaagaacttcatccagtatctctttaaactccgctccgtaaaacatcgcttttggttcacttgcttttaaaatgcctgtcatttcatatggtttcagctgccagctgacaggtacgacaacagcacctatttcaagtgcggcgaacataacagttgaggcgggatggccgtttttgcaaagcaatgcaacacggtcgcccttttgaattcctttttgaagcatggcattcgccagctgattaatccgtttacggtaacctttatatgtcagtgtatggtctccgctttttacagcctctatttcttcgctattcggcatgtcatgcagaatcagatgctgtaatgtttccatatcgtcatctcctatattctcttgaatcttcaataatttgttagattttcttccttacctcacccattttaacccaaaaaagataacttgtaaaactatttcattttggaattattccaatactgaatgataaaatagtcccacattttcttattttgttccccatccacagaaaaacacacgccaaatttttgacgtgtgccatgcaggtttacagtatgtttttttctttcatccatgtgaaaaatatgcggtttaaccgctgatacaattcttgtcctccttcttcctgaaaccccgccatgctttctccgctctcgataattgccgagctgatcgcgcttaaaatctccgagccttcagcagataatgagccaggcgccatcatgacgagaatgcgtgtcatcctgagggtatttccgtccatgccatccacttcatagggggtgctgagatcaaacattttgaaaaaaggcaggacgatttcatcatttttgagatgataaagcgccatgtttgttccggggattcccaatcccccttgtttctcccgctcagccaggcaaaccgcggctttttccggatcacggatcaggccatccttcttcagctgttgaaaaagctctagcagaagcatgctatggtccgggtttgttttgagttgagctagcgtaaaatggcgcagaacatcttggataacttccatataccgccctatgctttccgccgcctccagcatgtcaggtacatcagcttgctgcgcctcttccttcgagcttctttttttgttaagaataaggggaatcttccgcttgatatactgcttgacctggtttgcgtcttcctcatttaatagtgggctgaccatgatgtaatcaatgttttcataaggaatcggtacagtggacacaatcatatcataggcttgaacatccttcccctttagctcgatcagagatgacatatcaaacgattcaatttccggcagctcttttttcagtctggaggcaagcattttcgaggagccgatcccgcttgagcagacgacaagcgctttcacttttgcttcttcttttttgatttcaagagccgagccaaagtgaagaacgataaaagcgatttcatcatcagaaaaggacatgcccggaaaatacttttcgacaccttcttcgatcgccatataaagcagaaaataatcgcgcttgatctgttccttcatcggattgtatatctcaatattttcttttatgcggctgacggccggctccaaatgggcaatcaagccttcatataaagagtagtttttcgtcagatccattctgattttgtctgaaataaaagcaatgagccgctttgtttgcagggctgtttccagctcaatttcctgcgctttgtattctgttttgtattttcgattggcgcttcgaagatggattgtaatatagccgacctccgcctctggaatcgtcacgccgaaggcacgttcaagctcgcccgcgatttcaagagcggagctgtattccttcgcattcatcagttcctcaagctcattttgctccatggtgatagtttccccaagcttaattcgttcgatcgcatacgtcagatggacgacgagcgctatataggagctgtcggacaatgaaaaagcgattttttctttgagctgaaataagatgcgctccatttttaacagctcacctttgctgacaaccccgaacattttctctgaagaatcggtttttcctttgatgtttaattcaaccgcttccaaaaacatttggatgtcgagacggttcacaatcaagttgccgacaattttccgtttcgcattctccggccctatgagctggatgccaaaacctcttttgcggatcagtgtcagtccaaagggagaaatccacttctcgagctcatctaagtcatagctgaccgtggcattcgtcacctggagatcatgagcaagcgtgtacagtttgacgggctcctgagactctaataacgaacaaagaatgagcagtttccgttcgtcggcgctgtattcatgctgttcatatgataaatcagtaagcagcttttgtttaccctcgggacttcccactgctttcaaccctttaccgggctgtttatctaacgtaagccccacggtttccatcagcggtttaattgatttgagttccctgtgaatggttctcgtgctgacttgcatcagctcagcaagctcagttacggttatatatctgttttgtaataataagtgctttaacagcttttgttctctggcagtcatatacataaaaaagacctcctagccaatcttgatgtgcggatgaagtcgcaaggagatgcagtagaggatatagagaggtttccttttaatataaaacgctttcaagaaagaatcaatcacttataaatggtaatttggcactaagcggtgtgacaatattgaaaaagcatcagctggtaaactgatgctttttatggaatatcgtaaccctgtacggctgtaaaaatgcggaaccattgatcctggtcaagcttgtatgacaacgcatttatcgcggcggaaatccgctcgcgctttccgcttccgacaatcggcatgatgccggccggatgcgtatacagccatgcgtacatcacctcgtccaatgaagcggcgccgatttccccttggacggattcaagcgccgtacggacacgtcggtctttatccgtgttttcagtgaatactttgccgcctgccagaggcgaccaagccatcggcggaatccgtttttcctggcacaggttcaaagtgccgtcgagcatattttctaattcgtatgcggaaagctcaatctggttggttacgagcttctcaggcaaatatgattccagcatccgatactggtgatctttaaaatttgaaacgccaaagtacctgaccttgccagagcatttcaaggcctgaaacgcctctgctaccccctccggatccatgagcgggtccggtctgtgaatcaaaagcatatcgatataatccgtcctaaggttcataagcgattgctcaacggatgccaaaatatgcgatttgcttgtgttataatgatgcgatctgtgagcgggccgttcaggcgattcaagaacgataccgcattttgtgaccaactctatgttttctcttaatccaggcgaaagggcaagggcgtttccaaacagcttttcgcacgtatagcctccataaatatccgcatgatcaaaggtcgtgatgccgtgatcgatacaccattcaatgaggcttagaagttcagcatctgaatagttccattcattcagccgccaaagcccgtgtatgactcttgaaaattgaagatcctccgccaattgaatacgctgcatgcaaaatccctcttttctttgtataaaccgggttttgccccttactagttcattcggcctcagatcccctttttcctttcgctccttttaaaaagacattttaattcgattgaaattgctttttcgctttctcaacgacatagtggctgccgccgcggtcctgcacattttggatcatcatggcgacaagcaggtctttgttttcgtaatcgtagccgacaaaccagccattttccgtgccgtctttatcatcttttgatgttttcagctcggctgttcctgtttttccagccactgtgattcctttcacgacaggctgatacgctgatccgcgctcatcttccacaacgcctttcagaccttttgtaatgtctgccgctccttccttcgtgaccacttgcttgtgccaaacatcagctgtttgtgaatcttttttgatcagcgtcggtttgacaaggtctccattgtcaacaaatggcgtgtaagcagttgccaagtgaagcggagacatttgcatttgcccttgtccgtagcctgtatccgcaagcaaaatgtctgaatcaagcttgtcatttgcaatagacgatttctggatcgggaattcgtacggaacgtcctctgaaaaaccgaatgtcttcaagccttttgtaaaggtgtccgctcccatatcaagcgcattctgggcaaaataaatattgtctgacgtaataagggcgttttccaaatcgacttgttgaagtctctcagacacacgtgtcactgaatagccgccccagcttgaatctttttgccactccttgcctttgattgttttcttctcatcggctttaagggtgccgtttttgattccaatagcagccgcaatcggtttaatggtagaacctggcgcgtatgtcttattgaatttcgctgaaaacggattgtttttatctttgtttagctttttccattccttatcgctccagccgaaaataaatccgtttggatcgtaggaaggcgcgctgacaagggcgagtgtttcgcctgtcttcggctgcagcgcgactgccgccccgctgtcatccttcagttcatcatacagcttcatttgcgttttgatatcaattgtgaggtgaagatcctcgccgtcctttgctttcttttcagcgatgacttccccggtttgcggcacgtagattttccagccagttgtgcctcttagcttgtcttcatacacattttcaagtccggcgataccgatgttagacgtatcgctgtacgttccttctttctttttcttcagttcttccgctgtaatggcgcggacatagcctgtcaaatgggctgtcttttcgccatacggatagtagcgggagctgacattcgttcttgttacgccttgtaatgacgtcgcttcagaaactaatttctcctggtcaggcttgacctttttgagcggcacaaacgaatcgtcttttacccagccttgatccagctttttcttgatgtcgtcttcagtcaaatcaagttttttggcgagttcttttatgactttctcttttttatcgccaagctctccgggaacaattccaatttccggaacatctgtattgacggctaagccttttccatttttatcgtaaatttggcctcgtttcggttcaatgctcataatttgcacggttttgtcgtcagccagctgcttgaaaataaacgatgggtcccaatctatattccatgactcctcgtcatctgttttttctaatttcagcacagcagtattcttgaagctgactttgccggcatttgtgttcatgctgactttatacgggatatgtttcatcgtcttgttgtcttgatcgtccttatctacttctcccgcagtgactttcaaattttttacgccggcctgctcatagatggctttatacctgttgacgaaatcttttttggagatttcttttttgacatctttagtcaggctttgatacatgtcatcgaattgctgatcgttccactgtttcacgaatgcttccatgcgatcctctggtgaatctgttttggagcatccgattaacccaatcaatccgacgcatagaaatactagtagaatacacttttttaacatgactttcccctgccttccacttgttattttctcttaattgaattggtgcgtgcaagatttttttgaaaatgaaggaaaagttcaccgattttgcagaaatctcctatcgtttgctgtagactatttgaaaagacagaaagaagggatagcatggtcagagaggcagcaatgcttcacattaaagaaggccttgaacaagagtttgaggatgcattccggcaagctgcgccgattatttccggcatgaagggctatatcactcactcgttatcaaaatgcatggaggaaacgcataaatatctgcttcttgtggagtgggaaacacttgaggaccatacggaaggctttcgcggttcttcagagtatcaagagtggaaagccttgcttcatcggttctataccccgttcccgacggtcgagcattttcaggatgtgtaatagatttatataatatgaagtgtaaaaccgataagggagacagaccatacaaaaacggcggtataaatattaaaagcgcctgagccgtcattttcttttttgcgctcttcaagcccctgcataaacatgaccgcaccaagaaagacgagcatgaccgattggattacagaggtgtgttccgtatagttaaaagcaataagcgccagtataataatgataaccgcaaaagacattttaaaaatccgaaacaaaaggaccatccttccttatatacgaaatattgaacgttatggctatatttgcctacgccctccattattctagcgcactttgtttgtctgtagaacagaagacagagaattttaagtttcttttaatatttcgatcacacataaaaaacgcgcctgtcatgaggcgcgttttctatgaaactgataattctttatagcctagcttgtgaacggcttcagccatcgcttgatagcctttgctgttcggatggacaccgtcaaaggacagatattcctgttctttgcctttgaagatgctataggcatccgcgattttgacatggggtgctgatgcaagtgtttctaaatgtgaattaaacgaagtgatccatttgccggcgatatcaatttcgggaaacggattgtataagttgaacacacgaatggcgtacggggaaggattttctcctttaatctcggcgactttggcaatcatcttttcaaaattctcatggcaatgggcggatacacggctgaaaatcgtttcatccttagaggtttggtaggctaagaccgaatcgatgagatcgtttccgcaccctgtgatcgttatcatatcagcatctcgaatacatttttgcacatagggatatgacaggagtcccaaaatctcttctgtattcagacctgatctggcaaatatgtttattgccgttcttgttttcaagtcagcttccatcatgtccccaaaacgctggacgaagccgggtgaaaacagcccggagcctctccctgtcgtcaaggaatcgcccagagctgtatatcgaagcaccatgttctttcctccactcttgaacgtcgatacgttaatgtacgcagcagagaaaagattggctacttatgtatatcctatttttcttgaaatctgtaaagcggcgtccttcaccttttctgttaaatagggcagcctgtcttctgtaaatctcgcttcaaagcctgcaatgctaatgccggctgccacctggcgctcatggttaaagatcggggcgccgatcgccgccgtatagttttcgagctctgaatagctgacagtatagccattttgcacagaggcatcaatctcctgaagcagtttttcgggatcggtaatcgttccggagccaatcgaaatgagctcggtttgtttgatgtatgcttcgatttcttcacggggaagaaaggacagaatgcttctggcgcacgctcccgcgtataggggggaacgcctgccgatcgccgtatacagccgcacagtctgtgtcccttctattttctcaacgtatatcgcttcattgccgtccctcatgatcaactgcacggcctcatccacttcccggcacagctcttccatcaccggtttcgctatttttctgatatccagcctgtcagcgacaagctgtccgaattccaaaaacaccaatcccagcgaataagcgccggacgcatcccgactgaggaaccccatttcctccaaggagctgaccatccggtgaacagaggtcttcggcattcccgtcagcgacaccagttcacttaaggttaggcttggtttatgcaaaaacaaattaagcagcgccatagatttgactacggttttatttttattctgcatcattcatcccctttgctatgtcagccattccatcttcattctcgttttcagttcttttatatgctgttcccgttctaccgcaagcgcttctgcctcctggagggacacaggctcaaactgaacgtgctcgcccggcatgatttgggaaacaatcggaagatcagcggatatgatgtgcgcgatcctcggatagccgccagtcgtctgccggtctgcaagcaggataatcgggttgccgtcaggcggcacctgaactgttccgaatgaaaccgcttccgacaccatctcaagcggggccttcagttcgagcggttctcctttgagcctgtagcccatacggtcggactgcggcgtgacacgaaatgcttcttcataaaaacgcgtttttgattcttctgtgaaaaaggcaaattgctttccttccagcacccgaatgacgggattcttcttcaatggcagaaatctgccgcggctgactgaccacttcggtgctgcaaatccctgttttccaagctgcgaacttaagcgagaaaggatggtttgcgaaagagctgacatctctccaatgttcagttcatcttctttttgaagcgctctgccatgaagtccgccaatgcttcctctgacgtatgtgcttttactttccatgacggcaggcacctcaatgccgccagctgccgccaaataagcacggctgccgagtttgcaggggccaaagctgaccgtgctgttttccttgatgagcacaggcttccataaaggcgcttcctcgtcattaatacgcagcgtgaagtccgcccctgtcacagcaatcagtgtctgttttgaaaaatgaaacgacggaccgggccccatcatcgttatttcgagacctgcttcattttcgccgtttcctatcaacagattggcaatgcgcagtgaaaccgtgtccatagcgccgctggccagaacgccgtatttttggtaacccgttctgcctatatcctgaaccgttgtgagcagtccgggctttaatactttcatgctcaattggactcctccttataggcgtgatagtctttttctgagatgcgaacgaatttcacaatatctcccgcccgcagcaatgtcggcgggttttcctgcggccggaaaagagccagcggcgttttgccgatcagctgccagccgcccggcgttgaaatcggataaacgcctgtctgcaatcccgcaataccgaccgaacctgcgggaatcgacggtcttggcgatgattttctcggagctgcaatgcgttttgacatcccgcctagaaaaggaaaaccgggcgcgaagccaagcatatacaccacatattcaccgtttgtatgaatgtcgattacttcctccggtgacagttgattgatcttcgccacctcttctaaatccggaccgaattcaccgccatagcaaacgggaatttctacaatacggcggttgacctcatagtcttcggctatttctgccagccgctcttcgacatcgcgcttgacactctcaaaaggtgagcttatgccttgaggcaaatgcttgtacacttcatacatatcataaaatacggttagacttgtaaaagccgggatacattcaatgaatcccggaaatggctgttcttctatataagcggccgctgcatggacaatgccgttgacctgttcattgatttcttctccgaatcggatcatcattgcagaatcaccgagctgttcgatttgatatcgtacagtcatctttctcacctcttttaattctcgttcatcaggatgacgagaggctacagcaccgcaagcgactcgtctcgaatatctgtgatgagcatatgccccggcgcatgtgtgatgaccatttcaggctttacattcatagccacggcttgcggggtcactccgcatgcccaaaaaacaggaacctcgccgtcacgaatggaaacggcatctccgaaatccggtttcccgagatcgcgaatcccgattgctcccggattgccaatatggatcggccctccgtgcacagccggaaaacgcgaggtcacttgtgcagcacgtacagccagccgttcaggaaccggcctcatgctgacaaccatctgtccgtgaaacgcccccgccggaacacaatcgatattcgttttatacattgagacgtttgtcccctcatcaatatgccggacagctatcccattattgatcagtgcctgttcaaaggagaaactgcatccgatcagaaagccgacaaaatcgtcctcccagtatggcgtaatatcagatacttcttccgttaggataccgtgcctgtaaatacggtatttcggaaagtccgttctgatatcagcatccggcgcagccagagacggcacaggcgaacctgcttcagtcacatccagcacggggcagggcttttgatttcgctggcaaaacagcagaaaatcaaacgcaaggtcctttttcaaaaccacaagattcgcttgggcgtagccgccggacatgcctgcggtcggcccgtttattttcccctctcgtatcagggcgcgtacatcctttggcgccattttgtttaattgctccacttatatcagctccacaattgaggaagttgtgtacataacgtgtagattcccataactgccattacaatcactacaagcgcgcctgtgcttgtcagccaaagcggatgcttataatcaccgacaatgtttttcttgtaggcggcaacaagcagcgttccgagcgcaatcggcagaattaagccgttcagtgaaccgacaaggacgaggatcttcgcaggctggccgattgtgacaaaagctaacgtagaaaccacaataaatccgataataataccgcgtgaattcttttcaatttttggagaaaaggttttaaaaaatgaaacagatgtataggctgctccaataacagacgtaatcgccgcagaccacatgatcaatccgaaaattttataaccgacatttccagcagccagcttgaagacagaagccgccgggttgctttcatcgatgtgcaggcctttcgatacaacgcctagaaccgcaagaaaaagagcgatacgcatgacagatgtaattaaaatgccgacaaccgagctctttgtcacctgcggaatggattcctttcctttaattccggcatcaagcaaacggtgtcctccggcaaatgtgatataaccgccgacggttccgcccactagggtgacaatggcaaatatgctgatgtgttccgggacgaatgtatttgcgactgcctgtccgaccggaggagctgtcgtcgccgcaacgtagaccgttaaaataatcatcacgaaccccgcgatttgcgtaaaacggtccatcgcttttcctgcttccttgatgacaaaaatcaaaatggcgataacggcactgattaaagcgcctgtttcaggtgtaatgccgaacagcacctgaagtcccagcccggcccctccgatattcccaatattaaaagctagtccgccaagcacgacgagaatggcgatgaaataccccagtccgggaagcaccatattcgcaatttcctgacctcgttttccagaaactgcgatgatgcgccacacattggtttgggcgaaaatatctaaaataatagagattaagatgacaaaaccgaagcttgctgcgagtgtgtttgtgaatgttgcggtttgggtgaggaaacccggtccgattgctgatgtcgccattaaaaaggcggcgcccatcagcaatgaccagctgcccgctttttttcctgctgtctttttctgctgctccatctattgttcctcctttatgttgacctctgttctgaaatagctgtcacttcaattccagccgctttgagctgttttctgattttttgcgcaaatgtcagcgcatgggctccatctccatgaatgcagactgtatctgcttttaatgacacatcatgtccttgctgagatttgaccgccccttctttcaccattttgatgacctgggtgacggcggcatcatcactttcaatgagtgcgtccggctgggagcgcggtgtcagcgtgccgtccgattggtatgttctgtcggcgaacacttcatttgcggtctgaagtccgatccgttctcccgcttttacaagctcgctctcagcaagaccgaaaagaatcaggccgggatcaaccttatagacagctttcgcgatagcatccgacagtttttgatcgactgccgccatattgtataaagcgccatgcggcttgacgtgctgcatgtgaagtccctctgcttttagaaagccagagagcgcgccaatttgataaacgacaagatcatacgcttcctcaggagaaatcgccatattgcggcgcccaaaaccgagtaaatccggcaagcccggatgcgcacccattttcacgcctctttctgctgcaagcgcgacggtttttcgcataacactaggatctcctgcatgaaatccgcatgcgatattcgctgatgtcacatactctaaaatatcttggtcaaggcctatcttgtaggctccgaagctttctcctaaatcacagtttaaatcaatctgaaacacagaatccctcctgccaaagcaaacgatatgctttatgtcatttattgtcccgaaattcggaacgactattccgaatttttgaactttatttcattataagtgaatcatatcagtttgtgaaatacttttgtcagaaaacctaccatggtcccagaataaaacctgccaaactaaaaaagagagtccatcttaggactctctttttttatagtacccaatggcgaatcgctttagcgacaccatcctcaatatttgtatccgtgatataatcagccgtttcttttacgatgtcttgcgcattgcccattgcgacgccaagacccgcttctttgatcatcgcaatgtcattaaggctgtcgcccatcgccatcacattctccattgtaaagccgagtttttccgtaaccttggcaagggctgcagctttgttgatgccaagcgcgttgacttcaatgtttgtcggacttgaatttgtgatttcgagctctttgttttttctcagctcctcaagcacttcgtttcggatatcgtcatcctcgatgtcaaagccgaatttgagccattcatgatccgtaatgttttccggaaactcgcctctccatactttattcaccgtagaagcccagaaattagtgttgtgcttattccgcaaatcccacatcatttgaatatggtccgtatgaagcagcttccgttccaccaaattaaaattcgaatcccaaatttcactgccgtttgccgtgattagaaaggatgacagctttagcgattccgccagctccctgcacgtcatcagcgtccggcccgtgctgatcaccacatacacacctttatcctccgcttcacgaatggctttgcggttttcatccgagatcagctgctcgtcgttcagcagtgtaccatccatatcaattgcgatcagcttgatatctacatcttctctttgaacagacatatatgtacctctctttatctttttgttgtgcttctctctattctaatacattatacccagcgggacaaaaaagcgatttcctatgtttgaggagaatgaataagaggaaaacaaacggtgaggtgatcaaacatgacagaaaaaaaacagcaaaacaaaccaaatgaaaaccccgagcacaacgacttaaccgatccgattcctaatgaagagctgaaggaaaatatgaatgatgaaaaacacaaacgccagcaaagagataactctcaaagcgaacgggattacgacacaaaatagaacccctcacaaaatgttgtgaagggtttttttcatttttcaatatagatgccgatttcagcttcagcaacaggctgctctccaactgatgccttggcatgtccgaacacaaacccgcgccgattgcgcgtgacttcaaacgtaagatcaagccggtcaccaggcacagcttctcccagcttttccgctttcttcaccgaagacaataatcccaagctgttctcatctgtaattcctgtaaaagccgcggtttgcgcaagcgcttcaatcacaagtgaaaacggcatttctgtttgcgtatcagtgataaaccagtcgttctcactaatcagcttataagctgccgcatgtttgccgggctcgctatccgtcacgccatcaataaacaaaaatggatagcggtgaggcaaagataatgagttcattttatatctcctttttttgaccattatatctcagcctaaagtgaaacgataggatataatggaaaaaacacaaaaggaggccgttatgttcccaaaaccgcttgtcattctcgcacacgaaatatatggtgtaaacagccatatgaaaaagatgggccggctgatcaaaatggctggatatgatgtgttgacgcccaacctgctcggcgaggatgaagtctacacactgaaagaagaaaaaacggcatacgaacaatttacaaaacacgaaaggctgaaaacgggagaaaccatcatccagaatgtgatcaggcaaaacgccggacggcacatctttgtgattggattcagcgtgggggctactatcgcatggaaatgcagcagtatgcctgaggtgagcggatcggtttgttattacggttcccggatacgcgactctcttcatcacatgccagcctgcccggtcctattgtttttccctaattatgagccgtcgtttgacgtagcgcttcttatcaaaaaactgcgggaaaaacagcatacccatcttgagatttaccaattcgatgcgcttcacggcttcgccaatcctgattctgtttatttcaacagggcccttttcttcaaaacgctttctatcataaaaaacggggcggaaagccggctccgcaccgtttcatcatcatttttttaaacgtgcacggcgctttattatcggtgccgtcatgttccatgttctttttgcattgcattttattttgcctgtctcatctcaccgaatggataaaagacgagagattcagtaccgatgatatcgtcctcagaaggcatgcccattccgtttctgctatccagtgaattgagacggttatctcccatcacaaaatatttaccggaaggaacctcaacttcgaagtcacctgttaaggttacacccgactctttgacctcctgtttatattcctttaagtatggttcttccacctttttatcatttatgtatagctgatcatttttcattttaatgctgtcaccaggcaaaccgattaaacgtttgacaaatgagcggccgctctttttgtcatgaatgactatgatgtctcctctgtgaaacccgccagtccatttgactgctttatcaaccagaattctttctgagtctttaagcgttggggccattgatgatccttcaataagaaaaggcttgtaaaacaccaatctgatcgtaaaaatgagagctgcgatcataatgatactgagtacaacgatcgttttgatttttctttttttctttaacgtgattgtttttgcattcaacttccttcacccgatgctttcctaagaattccaaattattatacagcatttggatctgcttggttagactttcgtggaaattttcgtaaggaaatggacaggccggggcagccatctgccaccggcctgattcatcagagctttcttaagcgcgaacagatttcatcagtgacctcagccgttgtgctttgtcccccaatgtcgcgtgttttgatgccgtcggcagtcacttgctccattacatccagaattttcgcccccaattcttcctctccgaagtggtcgagcatcagcttcgctgtccaaatctggccgatcggattggcaaggccctgtccggcaatgtcaggagctgagccgtgaaccggttcaaacatggacggatatttgccggatggattgatgttcgcagaaggcgcaatgccgatgcttcccatcaggcttgagctgatgtcggttaaaatatcaccgaacaagttgctcgccacaatgacatcaaacgtttccggacgcgtcacaaaaaaagcggccagcgcatcaatatgctgagatgatgtttcgattccgctataatcagcggctgtctgctgaaagacttcatcccaaaacggcatcgcgtgataaatgccgttagactttgtggcgcttgtcacatggctgcgccgttttttcgccaattcgaaggcaaagcgcatgacacgttctgtcgcttttctcgtaaacacggcattctggatggcgatttcatcatcgcctctgtgaatgcgcccgccaacttcactgtattcaccttcactgttctcgcgaatcaccacgaagtcaaaatcatttggatgcagaagcggcgacgtaatgcctgccatttgtttggcgggtctcatattaatggaaagctcaagctccctccggattttcagcagcagcccccataacgatatatgatcgggaaccagcttcggatttccgacagctcccaaaaaaactgcttcaaattgagtaagcgtatgtattccatcttcgggcatcattttgccgtgctccaagtaataatcacagctccatggaaaagctgtgaatgagaatgacaaacctccgtgtacctcagccgctgtatgaagcactttctcagcagccgctacaacctcttttcctactccgtctcccggtattgccgcaatctcaaattgtttcatcgtcattctccttcccctgttatcgtaagcgctttctattatactagattgcgagatagtaaaaaaagcccgtgacattgtgtcacgggtggtcggttattgattaagtttctttaaaatgatggcgtgcaacggttcatgggactgaatgccgcacacctcttgaagtacgccgctgtatcctttttcttcgatcagcgcttgcagttcaaccgcttcagggtcaccggtgaaatcgaagcgcagtgctgcggcaattccttcagccagtgcattcggttcttttattttctttgccgggcctacaagtctatcattttctcccagttttctgagaggtgacctcgctacgcgggtcacatcgtccgaaatgaaaggattttcaaagcgaccgatgatttttttgatatattgttcgtgttcagtttgcttaaagccatacgatttgacgagatagtcaccagtttcaagcagcgccgaatgaacaacacggcggatttccggatgatcaattgcttctttgaccgttttgagtccgcgctgatagccgacatacgctgtgaccgcgtgtccggtattgaccgtaaacagcttccgttcgatgtacggcgttaaatcatcaacaaacagtgcgccgtttatgactggtgttttccctttaaagcctgattcatcaatgacccattcgaaaaatggttcaaccgatactttcagcgggtcttcatgatgctgaatcgggacgatccggtcaacggcagaattcggaaaacctaccgtttcactgacggatttctgctctgcttccgttaaatggctgtatatttctttctttaagaagctgcttccgccaatcatattttcgcaggcaatgatattcagtgtgtttgcagtatttcttcgtcttaaaccttctgcgatagacggggcaatcagcttcagcacattcgggccgacagctgttgtgatgagcgccgcctcattcatcagccggtacagctcctcggtctgactgccgctgttaatagcgctcaccgggccaatgatctccgatgaacgtccctcttccgccagttccactgtgtattcttttttttcattgaggaggctgaccatcgtttcgttcacatccgcaaacaccacatcatagccggagtggtgaagcagcgcgccgataaatcctctcccgatatttcccgcaccgaaatgtaaggcgatcatgtcagttcacctcgttgaaaatggcgatcaaatcttcttcgcttttagcggagatcaggcgttcaatgttttcttcttctgaacagataatggcgatgttagacaaaatgtctaaatgctcattatttttacccgcaatgccgaataccacttttgccgtgttgccttctccgtactcaacgccctctggaatctgtatgattgaaattcctgagtgaagcacctcgcttttcgcttcttctgtgccgtgtggaatggcaatgaaattccccataaacgtagaagacgtttcttcacgttcaaacattttgctaatgtaatcctctgtcacgtagccgttgtcaatcagcgtctggcctgccaatttgatagcctcttcttttgatgataccgtttgattgagtttaatgttttcctttgcgagtacttgcatgacaatcactctctttctataagattactttttcagcttttcaatcagctcgtcgtatttcgggctgtttaagaagttatccactgatatgtgcgtcgcgttcggcagctttgctttcgcgcggtctgttaaatctttgtgggtgatgacaatatccgcatcgcttggcagattgttaatggccgtgttggtcacactgatgtcaagctccgcttttttcactttgtttcttaagatggatgcccccatggcacttgatcccattcccgcatcacacgcaaagataattttgttcacgctttcaggagacagctcagacgcttcttctgctttggcttgttccgcctctaaagcagctgctgcttggcttttcttccccttcatggactgcattttttctgttgcggcagccaggtcttcttcactagctttagaggatttcaggatcactgctgaaacgatgaacgatacagctgcagcgaccaatacacccgccaatacgccgaaatagcctcctcttggcgtcattgccatcaatgcgataatgcttcccggtgacgctgccgcgacaagtccggcattaaagatcgtaaatgttaagagtccgcttgctccgccggcaatggctgcgagaatcagggccggtttcatcagaatgtacgggaagtaaatctcgtgaatccctccgaagaaatggatgatcgccgcaccgggagccgttgattttgaagatcctttgccaaagaacatgtaggccagcaaaatgccgagccccggtccagggtttgcttctactaaaaacagaattgattttcctgtttgagatgcttgctcgattccgatcgggcttaagattccatggtttatggcgttgttaaggaacaacactttcgccggttctacaaaaacactggctaccggcagtaaattagcgtgtacaatgacttccacaccagccgccagcaatttatttagcgtcaagacaaccgggccgatggcgtaaaacgcgagaatcgttaaagccgcgccgacaatccctgccgtaaagttgttgatcagcatttcaaagccttgcttgactttatccttgaataatttatcagtctgtttaatgaggtatccgccaagcggacccataatcattgcgcctaaaaacattggaatatccgatcctacaatcaccccaattgccgctgtcgctccgacaactccgccgcggtggtcgtagatcatttttccgcctgtatacgctatcaaaagcggcaataaatacgtaatcatcgggctgaccagcgtgttcagctgttcattcggaaaccatcctgccggaataaacagcgcggtaatgataccccacgcgataaacgcgccgatattcggcatgatcattccgctcaaataactcccaaagcgttgcactttcactttcatgccgccttgctgctgttcttgctgctgcatatataaaccctccctgttttgtttgtcgctgtaagatacaaaaatatgttcagagaatgatgcttccctttgactctatgttaaaacgcttacagtccctatacaattgaaagtaaagaggactttggcacatgactgtgacaattttttaaaaataaaaaggctcctggtttcaggagccttttctctttcctctataaatgatgttgccattttgaatcacgtactttgcaatcatccgctcactcacaataaaaacgggatacgcgcacacaagcgcaaatacagccatcggcacgtgctgtacagctggcagcactgagcctgccgcattgcggaggagcatcaaaagataaataagcagcacgatggccgctaatgataccagcataatcggagctgaaactttatattcataaagccgttcccggcagtggccgcagcgaaattgacaaggcacatttgatgatctgaccatatcgcctgtcaaaggtttgccgcagttcgggcatggtgtttctttcatagggtattcctcactttctattccatctgtctattataccagagtcccttctgtttcgttttgttgctgttcaacacattttcacattttttatcatccacttacttgtctccgtctctaaaatcctctacgcttaaatagatcttaatgaagagggtgtatgaatgcttccgattaatagacagcaacacatactgaagtggctgaaagaagaaggctcgcttagaatttctgacatcagcgcaaggttcggcgtttcggaaatgacggtatatagagatgtcaatcagctggttcagtcaaatcaggtcattaaaacggccggcggcatcacgctccccgtccgaacacctcaaacagatcatatgtgcagctattgcttgaagcccgtcaatcaagctcattcggttcagctgattacggtaaaccaagacattgaacagctatgctgcgcacattgcgcgtttttgcgttacgcggataaaacggaagaggtttcacacttgatttgcagagattttctgttacagacaaccgtcagtgccggttcggcttatttcgtcgtaaatgctgaattaaacctgcactgctgccagccgcaggccattccgtttgcgacacttgaccatgccgaacgatttcaaaaaggattcggcggagccgtctgcactttcgaccaagcgctggaagacatgcttcaagaccgaaagaaacgctgcacctgcaccaagaaataacacaacacatacagcggaaggtggtgtctgagtgatgaagcgaaacagatggtggatcatccttctgctttttcttgttttcctgccgaaaacaagctttgctcacgcctatattgtcaaatcttcacctggggaaaacagcgaattaaaaagcgcccctgcgcaggtggaaatcgaatttaatgaaccggttgaagaagggtttcattacattaaagtctataattcaaacggcgaccgtgtggatacggacaagactgaaatcaaaaaagataatcatcacatcatgacagtgaagctgaagaagaatctgcctaaagatgtgtacagagcggaatggaatgccgtatccgcggatggacatcctgtttccggcgtcattccgttcagtatcgggaaagcggatggcggattcagcagccaaaaagcagccgattcagcgctgaatccgggaacagcagcagatcgcgcgattctgtatacagccttatctctgtttatcggaacggttttcttccatcttttctggtataaagggaaatcagaacagctcgtcaaacggacgagacgtatcctgaccggctcgatcgcagcattggggctggcgcttttgcttcagcttccgattcagacaaaagcgaacgcaggcggcggctggggcagcgcattccagccgggctacatcagagaaacactgtttgagacagcaggcggctccatttggatcatacaggctgcgctgttcgtgctgctcgcactgtctgtcatccctgcgatacggaaaaaccgcttttcatcctttggctattggacagcgccgctcattttctttttcggtctcctgcttgccaaggcgtttaccgggcatgctgctgtcgttgaagaaaaaacggtcggcattttgatggatttccttcatttaacttccgcttccatctgggtcggcggaatagcggcactcgttttgctgctctcaaaagaatggaggcagcctgacaaaacgctcgcgtgggagacggtcagacggttctccccatgggcgctcactgcagtcggcgtcattttgttttcaggcttgctcaatggatttttcatcattcgttcaatggattcactgttccatacagcgtacggacaagctcttttagtgaaaagcgggctgtttgttttcatgctggtcttaggcgcaattcattttctgcttaccagaaagcagcgccgcacaggaatcagccgaacgttgaaagcggagtgggcaatcggcatcgctgtattgatcacagcggccgtgtttacaagcctgccaagcccgcctgagccagcgccggaaccgttctaccaaaccaaagcgatagagaacggacaaagcgtttctctcagcatcagcccaaaccagcctggaaaaaatgtttttgagctgcgggtcaccgaccataacggtgatcccgtgaaaaacatccagcaaatcacgttaaccgtttataaaacaggcctgtcaggcagcgaaaacaaaagcacctttacattaaaagaaaaaacaaaaggcgtcttccaagatcaaaacctgtcgattaatgaaaaaggaaactggaagatcaaagtccacggcctgaccggcgactttaacgaaatcaatatcatgtttacaaagaccaattaaggagtgtttacgttgttgaaaaaaatcgcattgacactatgtccggctattgtcggctccctcttattctttacggcccctgccagcgcgcatgtttctgtaaaaccggctgagtctgctgcaggctcttgggaaacgtatacaatgaaggttccttctgagaaaaatctgccgacaacgaaggttgtcctcaaaatgccgaaggatgttgaattccagcaatatgagccaattccgggctggaaggtttccactcaaaaacatgatgacaaatcagtatccgtgacatgggaggcgactgacggaggcattcaggaaggccagttccagcagtttacctttgttgccaaaaaccctgacaaagcggaggaagctgcttgggacgcataccaatattacaaagacggcagcattgttgagtggacaggtgacgaggatgccgatacacctcattccattacaaacatcacgtctgcaaagcaagtgacagatgagcacggcgccacgaaaacagaagacgattccgaaaactcaggttcttcagctctagacattacagcgatggtgctgtctgcggctgccattattttatctgtagcagcacttgtaaagaaaaagcgtgcctaataaagaaagcgatccagatgtcatgtctgggtcgctttttatgtttaaccgcggcctgcctggaatgaaggatattgtgtcataccgccgtccgcgaataacgtgatgcctgtgacgtagctggcttccttcgaagcaagccaggctgctactgcggcgatctcctccggttcgccgatatatcccattggaatcatgctttctacatcagctttctgtttagggtcagcgaatttttcagcattgattggcgtgttgatcgcacctggcccaatattattgacgcgaatgcccttcggcgcgtattccaacgctaatgtttctgtcatcagctttatcccgcctttacttgccgcatagtggacaaataacggccaaggaatcacttcgtgcacactggacatgttaatgacatttcccttgatatcgttttctacgaaatatttaatcgcttcacggcttcctaaaaaggcacccgttaagttcgtgccgatgactttatcccaatccttgagcggcatttcgtgagatggcacaggattttcaagaccggcattattaatcataatatcgagtgtgccgaactccttaattgccgtttgcacgatattttttacatcttcctctttcgtgacatctccttggacgacaacagcttcaccgcccgccttgatgacctcttcttttacctcgttcggatcttgtttattactataatagttgataaccacttttgcctgctccttgccgaagcgaatggccatcgcctttccgagccctgaagcagctcctgtaatagcgacgacttttccttttaaatccggatacatatacatcctcctccatttgttatgaatttgttttggcgattcctaagaatacggcggcggcaataatcaggataatcccgatcgcaattgctattagctggcgtttcgttttcttttcacgcaggatgaaaataccgccgagcgtagaaatgacaattcccatttgtgaaagggaaaagctcgttgcaacgccgactcgcggctgagaaataaacaaaaacatatttccgcctgcccagattaaccctgggagaatatttctgatcgcatacttgttaaagggtttgtgtctataggttaaaactaaccccccgaccaccatgccaattgcctgtggcagcagcgcggaccagccggacacattgaataatctagccacgactacataaaccaaataaccaagagtcgaaacaaggagaatcaaaatgccctttttcaaattgcttggctcgccctcttttttatcattcttatcttccaaggacgtgagaatgattcccacaatgataaagatcaaagcgagaacgccaagcgtaatcgcaatcggtgttgaccattcgcggaacacgatcacaccgaacagcgaggtggaaacgagctgcattcctgtggaaatcggcattgttttcgacacgcccatcaattgaatgcttttcaactggttggcctgtccaagtgaccaaaataagccggatacgattccaacaataaaaatgcgaagggacagaacgggctgaacaaaaaagtaaataacgatagaaacaatgagtgccccgatcgtcgttcccagtgtctggctgtacggcccgccgcctaatttcacattgaagagaacaatgctcccccaaaacaaagccgggagaagagccaataataaatccattgttggggaaccttctttcaaaatgtatttgctgttattttggctggaattgttgtgattattcgccggaacacaaaaagagctgccggaaaatccggcagctctcaggagcgtgcattcttttataaaccgatggacaaatattttgtttcaaggtacggctcgataccttctgaaccgccttcacggccgatgccgctttctttcattccgccgaatggcgcttgaaccgctgacggtccgccgtcattccagccgataatgccatactctagattctcggaaatatagatgccgcggcggtagttttctgtgaagaagtaagcagccaagccatacggtgtatcgttggcaagctgaatcgcttcatcaatatcagaaaacgtgacgatcggggcgaccgggccgaatgtttcctcatgcatgatgttcatggacgtatcgacatcggtgagcactgtcggattcacaaagtagcaccctttgtcatcgtttcggtcatatgtgcccccagcaatcactttcgcgcctttttcaaccgcatcatctatttggctgacgattttttcgaagcctcgtttgttgataatcgggccgacattgacgccttcctcaagtccatttccgactttcagcttagacacttgctcgctcagtttcgcagcaaattcatctttaatggattcatgaacgatcaggcggttggcacatacgcaggtttggccggcgtttcggtatttggacgccatcgcctgttcaacggcaaggtcaatgtccgcatcttcatctacgatcagcggggcgtgtccgccgagctccattgagacgtgctttacggtgtcagcgctgtttttcataaggattttccctacaggtgttgagcctgtgaacgtgattttgcggattttcggactgcttgtgaacacatttccgatttcttctccatcgccgatcacaacctgaagaacatccttcggaatgcccgcttcatatgcgaggcgcgctagttcataagcagacagcggtgtgtccggcgccggcttgatgataaatgtacagccggcggcaagagcaggcgccgctttgcgtgtaatcatcgcattcgggaaattccagggcgtgatagcagcaacggggccgaccggctggcgtgtgacaacaattcgtttaccagttgtcggggccgggaccgttcttccgtacacacgcttcgcttcctctgcgaaccattcgatatagcctgcgccgtaaagtacctcgccgactgcttcctggtatggttttccgttttcctttgtaattaaatctgcaagctcttctttatgttcaacaatcagctcataccattttttcaaaagagacgttctttcgttcgctgatgttttagaccacgttttaaacgcttgatgtgaacgttcaatggcttcttctacctctgtggctgattgctgaggaatcgttttgatctcctcgcccgtagccgggttgtagaccgttaattgatctggcatattgaacattcctttcttttcatgattacttaaaatgatagcagacccggccattttctttccaatgattaagctcgcaggcccgcctccaagatgctgagcccttcatttaataggctgtctgagatgacgagcggtgtcaaaaagcggatgatattaccgttaattcccgctgtcagcaaaagtaatccgttttgattcgcataggccgcgatcgctgctgcttttgtcttatcaggctcacgcgtgtcaggatccttgacgatttcgattgcggccatcgccccgagtctgcggatgtcaccgatgaacgggaattcttgtttccactcatacgccttgtcttcaatgattttgccaatttcttcagatcgctcattcagtccttcttcttcgataatatccaagactgccaaagccgccgcgcagccgagcgggctgccggcatacgtgccgcccagctcccctggcgctgccgcatcaagcatttccgcacgcccgatcacaccgcttaatggcaggcctgccgcaagcgatttagaaaccgtgatcagatcgggcactacatcaaagtgctcaattgcgaaataagtgccagttctggcaaagccggtttggatttcatcagcaacaaaaacaatgccgtgttctttgcagaatgaagcgacgtgctgtacgaaccgtttcgaaggaataataaatccgccttctccctgcactggctccatcacgacacacgccaccgtttcaggcgccactgaagcgataaagaaatcattgaatgcttgaatgaccatatcgtcatagctttcatcactcatgccggccggcttctgataataataagggaacggcgcttgataaacctctggcgcaaaaggcccgaaaccgaatttataaggttttaccttgcttgtcatgctcatcgtcatattcgtgcgcccgtgaaacccgcgtgtaaacgagacaacgccttggcgctttgtatactttctggcgattttcacagcgttttcgaccgcttctgcccctgagttaagaaaaatcgcttttttctcatggctgcccggcgcgatgccgcacagtttttctgctaattcgatataagtcgggtacatcatgacattaaaaccaggatgaatcagctcctccgcctgccgcttcacagcctcaaccaccttcggatgcgagtgtccgacatttaacgtgccgatggcgcctgcaaaatcaataaatctccggccatccagatcgtacagctcggccccttctcctttgaccgccagactgcggttgccgttgctcacaccttttgacacaaattgatcccgtttttgctgccattgtgcagttgtgatgcttgctgttgtttgactcatgtgaatatccccctgtcggtattttcttatcattctgacttctctttggtatgatgaaaagtaccaattataactttttgatggtatcagaaggagaaactacaaaatggatatcacgattacactcgatcgttcagaacaagccgattatatctatcagcaaatttatcaaaagctgaaaaaagaaatcctcagccgcaatctgctgccgcactcgaaggttccctccaagcgggagctggctgaaaatctcaaggtcagcgtaaattcagtgaattcagcctatcagcagctgctggctgaggggtatttgtacgccattgaacgaaagggtttcttcgtggaggaactagacatgttttccgccgaggagcaccctccatttgcactgccggatgacctaaaagagattcacatcgaccagagcgattggatatcgttttcacacatgagttccgatacagaccattttccgatcaaaagctggttccgctgcgagcaaaaagcggcctcccgctcataccgcacgctcggcgatatgtcacatccgcaagggatatatgaagtgagagcggccattacgaggctcatttccctgacgaggggtgtaaaatgcaggccggaacaaatgatcataggggcaggcacacaggtgctcatgcagctgttgactgagcttttacccaaggaagccgtgtatgcgatggaggagcctggctacaggcgcatgtatcagcttttgaagaatgccggaaaacaagtaaagacgatcatgctggatgaaaaaggcatgtcgattgctgaaatcaccagacagcagccagatgtgctggtgaccaccccgtcgcatcagtttccgtccggaacgattatgcctgtatccagaagaattcagctgctgaactgggcagccgaggagccgcgccgatatatcattgaggacgattatgatagtgaattcacatatgatgtagacagtattccggcgctgcaaagcctcgaccgttttcaaaatgtcatctatatgggaaccttttcaaagtcccttctccccggcttacggatcagctatatggtgttgccgcctgagctgttgagggcatacaaacagcggggctatgatctgcagacttgctcatcactcacacagctcaccctgcaggaatttatcgagtctggtgaatatcagaagcatataaaaaaaatgaagcagcattataaagaaaagagagaacgcctgatcaccgctttagaagcagagttcagcggagaggttaccgtaaaaggggcaaatgcggggctgcattttgttaccgaatttgataccaggcgcaccgaacaagacatcctgtcacatgctgccgggctgcagcttgaaatattcggaatgagccgatttaacttgaaggaaaacaagcggcaaacgggcaggcctgctctcattatcggctttgcacggctgaaggaagaagatattcaggagggtgtgcagcggcttttcaaagcggtttacggacataaaaaaatccccgttacaggggattgattcaccagcggtcctggtctacattcagcacggcttcaagcagtcccggaaatgccttttcaaggtcttcagcgcgaagcgaataataccggcgctttccttctatccgaacttgagcgatgcctgattctctcaaaactttaaaatgatgcgacaaagtcgatttggcaacctgcacatctgcacaggtgctgcacgttttttcttttgcttcagctaattgcttgacgagctctaaacgaagcggatcactaagtgcatgaagaacctttgtcagctgcaatgtttctgtttctggatggtttggaatgttcatgacacaaatgtatcatacaacaattagaatgacaattttactatataagggtttttcctttacctcatttagaatacatgttacatttagttcgatgaaattcgaacaataaattcgcataacgacggaggagatttacatgatcgtattacaagcttacatcaaagtaaaaccagaaaaacgcgaggaatttttgagcgaggctcaatcacttgttcagcattcaagagctgaggaaggcaacgcgcaatacgacctattcgaaaaagtaggcgaagaaaatacatttgtcatgcttgaaaaatggaaagatgaagcggcaatgaaattccataacgaaactgcgcatttccaagggtttgtcgcaaaaggaaaagaactgctgagcgctcctcttgatgttgtccgcacagagcttagcgagtaaaggaagggtgtctcatatgaatgaagtgattaaatctttaacagaccaccgctcgattcgcagctacacagatgagcctgtagctcaggagcaattggaccaaatcattgaagcggtgcaatcagccccttcttctatcaacggacagcaagtgactgtgatcacagtccaggataaagagcgcaaaaagaaaatctccgagctggcaggcggccagccatggatcgatcaagctcctgttttcctgctgttctgcgcagattttaaccgggccaaaattgcgcttgaagatctgcatgatttcaaaatggaaatcacaaatggattggaatctgttcttgtcggcgcagtagacgctggtattgccctcggcacagcaacagcagcggctgagtcactcggacttggcacagttccgatcggtgcagttcgcggaaaccctcaagagctgatcgaactgcttgagcttccgaaatacgtgttccctttatccggccttgtcattgggcatcctgccgaccgttcagcgaaaaaaccgcgcttgccgcaggaagctgtcaatcatcaggaaacttatttgaatcaggatgagctgacgtctcacattcaggcatacgacgaacagatgtctgaatacatgaataaacggacaaacggaaaagaaacaagaaactggtcacagagcatcgcttcctactatgagcgcctgtactatccgcacatccgtgaaatgcttgaaaaacaaggatttaaagttgaaaaataagctcttattcggcctgtcggattttccggcaggcctttcatttacccggttaaaatccattgacttctattttgtttatctggtaaaattttttcattgttactcattggttttctgtgaaccaatgggttttctaatgttcaagaaagaaggaagccatgagatgcttgataaaaaaacagatatcttgttagccgcgcgaaagcttttttcggaaaaggattttacgtcggtttccatgcaggcgatcgcagaagaatgtaagatgtcaaaagcttcgatatataagctgttccaatctaaagaagatctgcttttggagctgctgtcatttaaccagaagcaaatggtggccgcggcctcaagacttcaggaaaatacagcacttacaccggaggagcgtttgacgcaaaaggtcaaaatggaactggagggcttcaggcggaatcagcagtttttcaatatgctgacctacggaaaccccaagctgcacaatgaccgggtcaaacagcatatccatcagaccagatcgacgattatctgctggcaccgcgattcgctgatccaggcgtatggagaaaccattctcccgtttgtgtgggatttggttatcattcttcacggcatgatgcgtgagtttttaatgctgatcaaaatcgaggaaaaaccgcttgagcttgacccgatcgcagagtttatcatcagcaccctcaatcagattatcaaaaacagggaaacccgccagtctcttcttccgcccgaagccatcgagctttatattcattcagcatcctcctacaagccaaaggataaatcagtcctattatcggaaagcctgaaggaattacataaaggcatctcttccctgtccgccgcggactatgacgtagatgaactgacatccgcagccgctatgctggaggaagaagcgaagaaggaagaaccccgcgcttttttactcaaatcactgattggctatctggaacaaaccggtgttttaacacagcccgtttccatgttaaaaacactgttaattacttagagaaaagaagggatatgtattgaacacaagtattgaacaaaaaccttttaaccgttctgtcattgtcggcattttgttagccggagcgtttgtggcgattttgaaccagacattgttgattactgcacttccccatatcatgagggatttcaatgtcgatgccaaccaagcacaatggctgacaacatcatttatgttaaccaacgggattttaattccgattaccgcgtttttaattgagaaattcacaagccgggcgctgctcatcacagcaatgagcattttcactgccggaacagtcgtcggagcgttcgcgccgaacttcccggttctgctgacagcgcgtatcattcaagcggctggagccggcattatgatgccgctcatgcagactgtattcctgacaatctttccgattgaaaagcgcggccaggctatgggtatggtcggattggtcatctcattcgcgcctgcgatcggaccgactctttccggatgggctgtcgaagctttctcttggagatcattgttttatattattcttccgtttgctgtgattgatttgattcttgccagcatcctgatgaaaaacgtgacgactttaagaaaaacacagattgatattttatcagtcatcctttcaacatttgggttcggcggccttctgtacggcttctcaagcgtcggctcttatggctggtccagttcaaccgtcttgatttcactgctggtgggtgtcatcgcgctgctcttgtttatcacaagacaaatgaagcttaaaaaaccgatgctggaattccgcgtcttcacgtttggcgttttcagcttaacaacactgctgggaaccctcgtctttgcattattgatcggtacggaaaccatcctgccgctttatacacaaaatgtcagagacgtcacagcttttgatacagggcttatgctcctgccgggagccgttgtgatgggctttatgtcgccgattatcggcagaatttttgaccgtgtcggcggaagagggctggcgattgccggtttctgcatcatcttcctgacatctctgccgtttatgcagctgactgaccatacgtcactcgcttggattgtcgttttatacaccgttcgtctcttaggcaccgccatgatcatgatgccggtgacaacagccggaatcaatgcgctgccgcgccacttgattccgcacggaactgcgatgaacaacacgattcgccaagtcggcggctcgatcggaaccgcactattggtttccgtgatgagcaaccaggcggcacatgcaggcacgacaaatgtgaagcacgccgccctgcacggcatgaacgccgcttttatagtggctgccgtcattgcacttgtcggcttccttctctcattcacattaaagaaacctcagcgccctgccgaacagcagccggcacgctgattaacaaaaaaagagccccgctatttagcggaggctctttttggttttacttttctaaaccgtctttcacttctttaatcatttgcgtcatagactcaagtccgcctcctgataaataccaagtagcagaatcaaggtagatgacatgaccatttttcactgcgtttacgtttttcacataatcgttttccacgacttgttttgtagatgatgtttctccgattgctgtaccgcggtcaataacaaacaagtaatcagggtttgtttttgaaatgtactcgtaagaaacactttgtccgtgcgtagacgctttgatgttttgatcagccggagccacgccgaatacgtcatggatcaggccgtatcttgatttagggccgaacgcgctgatttttccatcgttcgccatgatgacgagaccgtttttgttaagcttttcagcggttttctttacatctgcgattgagtgatcaatgtttgcgagctcatctttcactttgtcttctttatcaaagattttaccgattgtttcagcgtctgatttaaatgattccatgtacttcgctgtatctacaccaaggtaaatcgtcggcgcaattttagagaattctttgtaagactcagattgtcttgctgaaataatgatcagatcaggatctaattctgccactttgtcgaagtctggctcttttaagctgccgacatcagcgtatttgtcatccttgaatttggacagatatttaggaaggacttgtttcggcaggcccgctactatatcatcaagtcctagtttatctaatgtatctaagcttccaaagtcaaatacgacaacttttttagggttcttcggtacttttgtgccgtttttgtcgagctggtgtttcactgtgatttgttctttctttgtatcagaacctttgctgcttgtgctttggtttccgcatgcagaaatgacaacggcagtgaccaaagcgatgaatagtaacgcgaactttttcatgctcctcacctcttctatatattaagaaaaataaacacctattctttgattatcaatcgtctgaatcgggatggtcatatcgtagatttcctcaagcactgatgtttctatcatttcttcaggcggtccttctttaacgattcggccgtttttcaaagcgacgatatagtcagaatagactgaagcaaaattgatatcgtgaatgacgatcacgatcgtttttccaagctcctctaccagccgtttcagcagtttcataatttcaactgagtgtttcatatccagattgttcagcggttcatccagaaagatataatctgtgtcctgggcaatgaccatggcgataaatgccctttggcactgtccgccgctcagctgatccaagtatttgtcttgaatgtcttccagcttcatatagctaagcgcctggttgatatgaacccagtcttcctctgtcagccggccctgtgagtacggaaacctgccaaaactgacgaggtctttgatcgtgagcctgatattgatttggttcgcctgcttcaaaatgctcattttcttggcaagctctttgctgtcacatgctccaatctcttgtccgtctatgtaaatctcgccggaatcctttttgatcaggcggctcatgatagacagcagcgtacttttgccggcgccgttaggaccgataaacgaggtgattttgcccttttgaatcgtgactgacgtctcttcaagaacaactttcccgccatattgtttgcttacatttctgacctctaccatgatttattctcctttaacagcaagtagataaaataaatcccgccggcaaaattaataatgacgctcagcgtcgttgagaaggtaaacactttctcaaccacaaactgccctccgaccagcgcaatgatgctgatgaaaacggagcctgcgattaagtatgaatgcttatatgttttcaggaattctctcgccaggttgacgaccagaaggcctaaaaacataatcggcccgactagcgctgttgaaacagaaaccaaaatcgcaaccacgatcagcatctgcttcaccactttgtcgtagtcaatgcccaaattcacggcgtgctcgcgtccgagcgacagcacatcgaaaaattttgtaaaacgccagacataaacgcctgtcagcaggaagatgatgaacgcgagccataacaaatccgtattgatattgttaaagctggcaaacatcttgtcctgcacaacttggaactcgttcggatcaatcagcatctgcataaaagaagacaggctgctgaacagcgtgccaaacacgattccgataagcagaaggaaaaagatatttctcccctcacccttgaacatgatctgatacaaaacaagagaaaacaggatcatcagcagaacagagatgataaagttgatgtttttattcatgatgaccatattcgcagaaccgaacaaaaagataatgccagtctgaatcagcatgtagagagaatcaaggcccaaaatgctcggcgtcaggatgcggttgttcgtaatcgtttgaaagatcatggtcgaaaacgcaatcgctcccccagtcagcacaatggcagcgacttttttgattcgtctcggcagggtgtaatcccaattgcctaagtcataaaacaaaaacaagccaatacatacaatggctaaaccaacgagcaaagctattttcatctggttacgcataggcttttctccttaacagcataaacaggaaaatgccgctgccgatgattccgaccatcaggccaatcgagatttcataagggaagataatgattctgcccagtatatcgcaaaacagcacaaaaaccgctcccaacagcacagtatgcggcaggctgctcttcagattgtctcctctgtaaatcgatacaatattcgggatgattaaaccgagaaacggcagcataccgacagtcaaaatgacaagagacgtgatcagggacacgataatgagcccgatgttcacaacccgtttatacttgaggccgaggttgacagaaaagctttcacccataccggccaatgtgaatttatccgcatacacataggcaatgatgacgagcggaatactcagataaagaagctcgtatcttcctttcacgactaaagagaagtctccctgcagccatgatgacacattctggatcaagtcatatttatatgcgataaatgtcgcgattgaactgacgatattcccgagcattaaaccgacaagcggaataaagatggtgtcgttaaacttgattctttcaaggattttcataaacagaaaatttcctgcaagggcaaagacaaacgcgaccagcattttgattaaaggactggcggatgtaaacagcagcaaggaaattaaaatgccgagcctcgcccaatccatcgtgcccgccgtcgtcggtgacacgaatttatttctgctgatctgctgcataatcaaaccgcagatgctcatgcttaatcccgcaatgacaatgctgatcaatcgcggcaaacggcttgcaaacagcgttgacgcctcttgtttgcttaaatcgaagagatcaagcggcgacagatcttctacaccgataaatacagatgtgactgctaatatgataagtagaataaataagtaacgtagcttcatgctgcctccttacatccttacagcaaaaagaacgtatctcctactccgcaaggactcaaaacaatatggccatatagtaattgattatcattatcatttacatattaccatttttatagggttagtcaatattctttaaaaatattaacctagtcatttatcaattttactaatcattctaaccattttccatcccaaaacgttaggctgtttaccatatttatctttataacgcaggcatacggtcagcaaacctaacattattcctcgtgaaaaatacaaatgttctcctgagaaagaaattcccccttgatttacagtactgaaagagagataataaatactaaatttgtgtgaaaattttaaacattaggagatgtaaacatgaaggtcgttaaattcggaggcagctcacttgcttcaggcgcccagcttgacaaggtgtttcacatcgttacctcagatccggcacggaaagctgtagtcgtttcagctccgggaaaacgctatgccgaggatacgaaagtgactgatctcttaatcgcatgtgcagaacaatatttggcaacaggcagcgcacctgaactggcggaagctgttgtggaacggtacgctctcatcgccaatgagcttcagctggggcaaagcattatcgaaaaaatcagagatgatctgtttacgcttttagaaggagacaaaagcaatcccgaacaataccttgacgcagtcaaggccagcggagaggataacaatgccaaactgatcgccgcttacttccgttataaaggcgtcaaagcggaatatgtaaacccgaaggatgccggcctctttgtgacaaatgaacccggcaacgcgcaagttcttcctgaatcctatcaaaacctctatcgtcttcgggaacgtgacggactcatcatttttcccggttttttcggattcagcaaggatggcgatgtgatcacattctcacggagcggttctgatattaccggttcgattcttgccaacggactacaagccgatttgtacgaaaactttacagacgtagacgctgtgtattctgtcaatccgtccttcgttgagaatccaaaggaaatcagcgagctgacatatagagagatgcgggagctgtcctacgcgggtttttcagtgtttcatgatgaagcgctcattccggcattcagagcggggattcctgttcagatcaaaaatacgaacaacccctcagccgaaggcacccgcgtcgtcagcaagcgggataacacaaacgggcctgtcgtcggcattgccagcgacaccggtttttgcagcatttatatcagcaagtatctcatgaacagagaaatcggttttggccgcagagcccttcaaatcctggaggagcatggtttgacgtatgagcatgttccatcgggaatcgatgacatgacaatcattttacggcaggggcaaatggatgccgccactgaacgcagcgtcatcaaacggatcgaagaggatttgcatgccgatgaagtcatcgtcgagcatcatctcgccctgattatggttgtaggggaagcgatgcgccacaatgtcggtacaacggcaagagccgccaaagcattatcagaggcacaggtgaatatcgaaatgatcaatcaggggtcttctgaagtgagcatgatgtttggcgtaaaagaagccgaagaaagaaaagccgttcaagcgttataccaggaatttttcgcgggcgtgctgatctcttaatcgtacataaatagcgggcggcagcgcccgctatttttttatatcaccttcatatagccgaattcttcattttttctcttgtccactattatccctgccaaatggatcggttcagcatatcttatagtatccttcatagggaggtgaaaccttatgtcaggatactctaacggcggcggttacggcggcatcagttctttcgctttaatcgttgtattgtttattctattaattatcgtagggactgcgtttgttggcggcttctaagctgctgaccgtctctgcgggaccctgtccgccacagttttgcagcatttgctgaagcaatctcgcaaggaggtgcacaaaatgtcaggttacggaacttctttcgctttgattgttgtgttatttatcctcttgatcattgtgggaactgcatttgtaggaggctactaaataaacgtaatctccatgaaggcggcaccgcaagactatgtcttgcggtgtttttttgaaaagaaaaaccccttctcgctaatgagaaggggcttgttcttacgtcattcctctttctgtcacatgaaagtcgagtgcttccgcattagcagaaacgccagccgctgtaaaaatcgcggctgcggccaaacaaataacaaacaacttagatttcaatttcatacaaaccttcactcctttgtatttgttttcttgcctcttcaacttgtagaaagtaggaagcagacagtttaaaccatttctgttcatagtaatattttgctacttctagggctaaatcctctatatcagcgtacatatttttattttttaagtactggaaacatcgttcgattccttcttcattgggctgatccagatatagggattgcaaaaactcgaattttacggcatagtctgcatcgtctgtttctttagcatattcatagccccgcttgtgatattccgaagctttatcatgttttccctgtttataataaatcagggtgattaaaaaataggcttgcgggagagaattgacgatcctgctgctttcaaatgtggagaccgctttttcaaagtaatcaatggcagggtctagaaggtcttgattgtaatagcataacccgagattgtagtatgctcttccaaccagctgggctttttgttctgcttgggccatgttgagcgccaatttgaaatggcgtgcggcttgttcgaaatttctttcatccatcaggttgaccccgaagacgaaatggcactgaatgattctcacattataggtttcctgctccacgtaaatttcataggcgttttttatattaatcaatgaaaaatacgtttgcttcatataataataagcttccgcgattttaaaatagaattcagcccgttcaatatggtctgcgacaaaggagagctttttctccgcctgtttatagtatgtaatggcagaaataaattcccgcttatcaaattcatacatcccgcgaaaaaaattcacgtaatagtcgagcagccctttgagatctgcctggttgctgtcaatgtttcttgataattcagacaggcttggctggtcttcgatatttaatttctctaacggctcaagataatccagcataagctggtgccggaattccattagtgaataataaagcagcaagttggaatcatgctgcatgtgtttcagttcctgctggatttcagcttttaacacttcggcatccggcacgctgaatgtccggatatatctgtaccactcgttaattttttgaccgaccgctgaagaaggaattaccccactcttcattccttcaccctctcccatcaaaaactgtttatgtcatattttatcatgtttataggccgtcccaacccgaaaaacacgcaatctttgttttcgggagcacgcaataaaccgaagcggtgtgcaaaaaaggcggatgcatcagttgatgcgccgccctgtatgctattgctgttttgccgttaaaggaaggcggatgatgaactttgtgcctttcccttcttcactcttgatttctactgtgccctggtgcatttcaacgagctgcctgacgatcgagagaccgagtccgtattcaccgtatgctgtgttcgttcttgaaatatctgctttatagaatcgctcccaaatatgctcaatatcctcttttggaatgccgatacccgtgtcttcaatttcaataatcgtctctttataaccttccattccgcgcagccaaatgtcaccgttttgcgtaaattggatgctgtttttcgtaatgttgacgagaatttgaatgaaccggtcataatcggcatgtacgatgacgtgatcctctacttggatcatcagcttgttttgtttttcttccgcctgctgctgcaagtgctctttcacgatttcaaacacctcgatcagaggaacgtctagcttgttcaaggtaatttgctgggatctgattttttcataatccagattttcttttacgagccgcagcatgcgcttcgtttcctcactgatcagcgagaagcatttatcctttttatcctcaggaatcgtatggctgttcaacccttcaaccaaaccgttgatcgtcgtcagcggtgtttttaattcatgtgacacgtcagcgataaactgccttctccgcttctcaaggcgctcgatttcatcccttgactgctttagttttttcgccatgatattaaagtcagacgccagtacgccgatttcgtccccgtagctgttttccaaatggatgtcataatcgccggaagccactttatctgtcgcttctctcagcttttgaatccgcttgacatggaatttggacagaagccagctcacaagaatcgtaatcacaagcgtgctgatcacagcgtaaaacatatagaggttgacctgattgaccatctgttcaacaccgctgatcggagaaatcagcagaacggcgcctttaaattcgttctgaacaaatataggctgcgccacaagggacacttcatcatcaaaacggccatctgccctgatcgtgacagtctgcccttttttcagcttattccattctgatttcttcagctgttcccttggtgggtgatgaaagccttcaggaagaaaataaggctgctgctcttcattaaagatgataaattgcgtctttcttgtgcttaaaatgtcctgataaggatagagcctgcgcatgtccacctggccggattggaattcatttgcaatctgcaccgcatatgacgtcaattcctctactttgttctgataggcaaattccttcacaaagtgggaaaacagagaaatgataatgacaaacgctaaaatcaaaatgctgatatggcttagcagcagctgatataaatatttaatcttcatcaaatttataccctactccccacacagtatacaggaaaggcttgtcctcgctggcaagctttttccgcagccgtttgatatgaacgtcaaccgttcgctcatctccataaaattgatagccccatacctgctcaagcagctgttctctggagaacacctgccgcggattttggacaaggtaataaagcagatcgaattccttcggcgtgagattttctacaggctctccgtttaataatacttctctcgtcttcttattaatggtaaagcattccgtttcaatcatatcttcatcaataaccgctttgcctgtcgccttatatcttctgatgacggctttgatgcgggcaaccaatgtcagcgggctgaacggctttgtgacataatcgtccgcccccatctcaaaaccgatgacctgatctgattcagtgtctttggcagtcagcatgataatcggcaccgtgcttgtctctcttatttttctgcagatggtcacgccgtccatagatggaagcatgatatccaaaatgattagatcccaattttcttccgtaaaacgctggtacccttctaacccgtcatgaacgaattcggcttcaaaaccttctttaaaaaagaacatctccgtcatcgtacatacactaacattatcttctatcattaatattttcattatatcctccggttgttttgatgcttttttatataatagcaccattttaaacagaaggttttgcgtttcacaattgttagtttttatttcatcaactagaaatagattgttcatatttttttcatacctttggactactattaatttatcagcaaggggacgcgccccagaggcggtcttatcaataaaaatacctatacggaggaacataaatgaactttatcaaacgggccttttggaatatgaaggctaaaaagggaaaaacgttattgcaattatttgtgtttacagtcatatgtgtctttgttctatcaggcctcgccatccagtcggcagcacaaaagtcaagcgaactggccagacaggaactcggtggaagcgtgacacttcaggttgaccgccaaaagcaaatggaaaaacagcaggacagcggtgaaaagcgcagcttcgaatccacaccgatcaaagtgtctgatgcgaataagcttgcagcgcttgatcatgtgaagagctacaattacaccacatcagcttcagccaacgcgggaaactttgatgcgattgaaagctctagttcaagtgattccagctccagcagttcaagctcaaacgctaaaaacagtcaaggcggaggacaaggcggaccgcaaatggttcaagctgatctttctattgaaggtgtcatcagcacagcgttagtcgatgatttctctgacggagattcaaaaatcacagacggacgcgcgattacaaaatcagatgtcggcaaaaaagtaacagtgatcaacgaaacattagcggaagaaaatgatttaagcgttggcgattcgatcacaattgaatcagcaacggatgaggatacaacagtaaaactgaagatcgtcggtatttataaaacaacatcttcaggtgatgaccaagcccaaaatttctctttcttaaatccttataacaagctttatacgccttacacagcaacagcggcattgaaaggcgacgactataaaaatacgattgactcagctgtttactatatggacgacgcgaaaaatatggatactttcgtaaaagcagcgaagaaaacatcaattgactttgatacgtacacactgaatacaaacgatcagctttaccagcaaatggtcggaccgattgaaaatgtggcttctttctctaaaaacgtggtgtatcttgtatcagtggcaggcgccgtcattcttggcctgattgtcatgatgtcaatcagggagcgcaaatacgaaatgggcgtgttaatggccatcggtgaaaaacgatggaaattgattggacagttcttgactgagattctgattgtggccgttatcgctatcggccttgcatctgtgacgggaaatctcgtcgcgaatcagcttggaaatcagcttttatcccagcaaatcagttcatcaaccgattcaacgcaaaccgcaagcggacaaatgcccggcggcggtggcggcatgggcggcaaaatgttcggccacagttcatccaacgtggacgttatcgattcactgaacgtcgcggtttctatgaacgacatgcttatacttggcgggatcggcatcctaatcgcaatcattgcaacattgctgccgtcaatttcagtactgcggcttcatccgaaaacgatattgacaaaacaggaatagaaagaggcggaacctatgagcttattacaatttcaacaagtcggctactggtataaaaacaaaagccagccattgtttcaggatattaacatcagctttcaaaaaggaaaattctacacaatcgtcggaacatcagggacggggaaaaccactttcctgtctctggcaggcggacttgacgcaccaaaagaaggaaacatcctttacgacggaaaagcggtttctaaaatcggcttaaccaatttcagaaatcaatatgtatcaatcgtctttcaggcgtacaacctgctcccgtatatgacggctttgcagaacgtcacaaccgctatggaaatcacaggttctaaagaaaagaacaaagaatcatatgcgcttgacatgctgcagaaggttggcatcaacgaaaaacaagcccggcaaaaagtgctcacactgagcggcggacagcagcagcgggtatcaattacaagggctttctgctgtgacacggatcttatcgtagccgatgaaccgaccggaaaccttgatgaggacacatcaaaagagatcgtacggctctttcaggatctggcgcacaaggaagataaatgcgtcattatggtgacgcacgatgaacaaattgcaaaagtgtcagacatcaatatcagactttcaagaggaagttttactgtgaaggaaaacgtcgcagtcgtataacaaaacgcgcctctgccagtgcagacaggggcgcaccctatatcccccttttatatagaagtgaacataaaaagagcggcggccgcatccccccgctctttttatcatttttttgcttcctccccttttgacttctctcttcgtttctttttccaaacggccacaataaacagaaagagcggaaacaataattgaaaaggcaaatgaatatacagcggcaccacgttcaggccttcattcaagtgctccgaaaagttagtcgcgatcgttatagaaaggattaagatgcccaatcccatcggataagccaattgagaggggttcttttccttaaagagcgtagatgtcccaaccacagtggcatataagtagaggctgaccttaaagaagccgccgatgatcagcgccagcataaaaaagacatcgagccggtctaaaaattcttcgaccttgattgtctggatcgtgcttaaaagcggaaactgggatctgagtgtaagatcaacatcaagcacgctaatattaatcgccacggtgagcgccacaatcaatccgctaatagccatggcgatcatccccatttttttcacatcttttctgtcattcaggttagggaaaatcatcacaaataaaacaacttcaccaaatggaacgtacatggtctgtgtgaaaacagagtgaaggacaggagaaatgccgtttgccaaaaccggctttaaattgtgcgggtctatagtccctgagacaataatcagcacaaggccgatcgcgcccagtaaatacatggccccgaaaagaagttcggccgcgcgtgcgagtacttcaattccttttcttacggcatatatgcttactaccattaataaagcatttacaataatgataggtgtatcatgataagcaaacgtcagcagcatttctccaaagtcacgcagcacccttgcggcaatataggcaaagtacaagatatagagaaatgaaaacagccagctcagcttggttcccagcatatcatccatatattctttcggagaagaattcggataacattgataaatgccttgatacaaatagaaaagaaacagtccgatcgcacagcctaataaaactgctatccaagcatccctgcccgccattgatcccggtgtaatcaataaggagctgcccagttcaaaaatgataatcatgacaaacaactgccttatgcttattctggctttttccatctgtcacttcccctttcttcagacctaatcatctttaaactggtgtttgatcggattgtttcgcaatcccgtccttctgatatacgtctcggccttcacatcgatgggcagttccggcaaatattctttgtcccaagtgtccttcattttctcccactgctccggatactttctatatatcgtgtcaccaaaaccgataaaatctattttattcttcttaatctttttcacagtatggctgatttccttttcaagctctttgttgagcgctttttcaatagcggccagcaccttgggatcagacaattggaaagggtatttgacagcatctataataccttcaaccgacactttcacatggatgtacgggcgtccgttccgcattttcggtaccagctttgtatcttgatgggtaacctgcaagctgaccgcatccttcgtcttgccccagtcagcattaataaacgtatgctggatcttattcataagccagactgcccccacgctttcatcatcttccagccaatactttaaatatcctgccttatcaaaaaccgccaaaccatctgcctgaagaatggctttcgggtcagtcgcctgcgtgttttccatgctgactccttttttatcgtcaccaatcatcatatatccggggatgaccggtgccatagtgttggcggcaagtgttttcaaaacgtcctgaatattgattttgaccacccgcccgtattgtgcctccgtgaaatcgagtgttttattgactttatttgacggaattttatcaatcggcgtcaagattttcacaatattttctgcttttgttttatgggcaacgacgaatgttgctgttgtcctgaattctgtgtcccggtcaagattatctaatacaaaatccaaaccttcttcttttgccagcttttcattgatcacgactagattggtatgggcaaaataaagccgccgtgataccttcatggaggcttttctgagtgcttccgttatattgttaccttcaatcgaatagacagatacaggcggcctgtctccagcaccgcctccctgaaggccgccggcaacatttcctggattgataatttgaagatgcagcacgtagttgctgtcgtttgtccgatcgatgccaatcgccgagataatcgcaagatccgtcagctcccgcttatcccagcagccgggcagcacaatgacgctcaaaagcatgagaacggctaatagacatttacgtaccattctgatccccttcttccaaatctttgttcaccattcctcgtgaagcggccggctctgggcgttgatctttcccctgccgcaccttatcttccttgctgaccgattccggccttttttcatcggcccaccacggaacccggaaaagcgcgtcctttacgccttgtgaagaaaaaggtgcaagcggcgacatatatggaacgccgaatgaacgaagactgcataagtggacaaacatcataatgatccctaaaatcagcccgtaaaaacccataacagctgaggcaataataaagataaaccgaataagccgggctgaaatcgccattgcaaacgccggtgttgcgaagctcgcaatcgcggtgagtgccacgataatcaccattgccggagagacgataccagcctgtacggcagcctggccgattacgagcgcgcctacgattgacactgccgagccgacaacccggggcagcctgactcccgcttccctcagaatctcaaaagcaacctccatcgtcagcgcctccacaacagccggaaacgggacaatttcccgctgggccgcaatgaccactaacagctgagtcggtatcatttcttgatgaaacgtcgtggctgccacgtatacagctggtgccacaagcgaaatgaaaaagactaaaacacgaagaattcttatgcttgtcgcaatgtcaaaacgcgaataataatcctcaacagactgaaaaaactggacaaataaggctggggcaataagcacaaacggtgttccgtccacaataatcgcgaatcttccttctaacagattacccgctacaacatcagggcgttctgtatgatacatagtcggaaacgtcgtaaaggtttcatcttcaatcagctgctcaatatatccagattccaaaatactgtcaatatctattttttccaggcgctgtttcacttccttcagcaccttttcatcacatattccttgaatgtacatgagagcgatatccgtattcgtaacagaaccttttttcattttttcaacccataaattcggatttttaatgtatcgccggatcatggaaatattggtttgcagagactctgtaaacccttggcgcgggccgcggaatgacacctgggtgctcggctcttggatggagcgctgctctcccccttgagtgctgcaaatcaaagcttcatcatggccatcagcaaaaatgagcgcattgccaagcattaactcggaaaaaagcttgtcccagctcttttccgctttcaccccgcccagcgggagcgttttttcaagaatttgctggatcgcatgagtattctggatagactcatcctgtaccaatgggtcaattaacgactcatggatcgtgttattatcgaccagcccagaaatatagataacagctaggtggacatgatcctgctccccgattttaatctcgcgaatgatgacgtcagagctgcttccgacttcctttttcgtttccgctatattctttgctaaacttggagaaatgagaaccggcctttctttttcttgctgctgttcctgattcctttcgtctgtattctgcttgtcttttgaatcggtattgttctttcgcttagaaaataaaggcatacacaaatacctttccttgtcgttttctcatattcttccttttaaaattgagattatgcattagggttagatgcggtataacttctccgccaaagatagacactaaaagcggaggatgatgaagcatgaagatattgggcgtgaccggattcatattaatttgtttattagctatttctgtgttgatggacatgcttcaagggttcagtttaacaaaagccgtttataacaatatgtccagctttaagatgacaacatttgcggaatgggtcgtgcttttattttttgtgttagtacttgtgagagaaatgtacgtgatctataaatcgaaaaaaaagaacccctaaaggggggcgcttttttcagacaatcatattgccgtctattgtatcactgctgtgtttgttgatggtccctttaaaaatgcggttgccgatgattttggaattggttgacgtgtttgtttgaatagctgtcgcagtgcccgcggagaggttattgatggtgtttccagagatgatagagcctgcagagccattgagataaatcacaatcggattcccggctgttctgttgactgaaatggtattatcaaaaatctcatgcacacctgcgctgatatagatggtgaccaaaagcggggatcgctctaagtggttgccgataattgaggtttttgcacttgtggagcaataaatggggtaatttttgaactctttaaatgtattgtttttgatgatggcgccggcattgtttgtgacggaaacagaatatgattccggcactgcttcaaacgcgtcaggattcagtgtattcccttcaatcaccgcgttcccttgagcaatccaaatgccccggctgaattttctcaggagattatctttaatgatcatatttccgccggaaacgttcacaccgtcaacgacttgaatgagacagttattcagaaatgcgatgtcatctgacagcactgcgcgaagaccgatgctgcgccttgtttcagacagtccgttttgaatttggtttccgtctacctttacgtcggaggactgataaaccaatatccctgtgttttcaaagttgctgattttgttgttcgtcacaagaacgctctttcccctgacatcaattccagttgaaaatccggtaatgaggttgccagcgatcactgcatcactggtctcttttccttgtgatacaccgagtccggttatcccgactcttggcgcagccgccgcgtcttcagggcgtctcagaatattgcccttgatcactgtttgcgtcccatatccgtagctgattgtattgtctgagtgatttccttctattaaaatgccatacccgttaaaattggtcacagaacttgaaacgtttccaacaaagtggttattgcgaattgatacattaatcggttcctcataatcaacgtcaccttcgccatatccttcaatgtcaattccgaatttcggcgctgttccattccccgttccggcatcttcaatcaagcattcctccaccgtgaccatgtcacatccggtaatggaaatgttatttctcctcgaccgccgaacctcacagcggcggatgataatttgctctgacgttcgataatcttgattggtctttaatccccttgggctgactatgatcccatcgccggtaaaatcggaaattttcacatcatcaatgacaacattcgagcatccttcaatacatatgccaaagccccattcatgggttgaccttatccccgccgaggcatacgtatgctcatcccgttcgccgataatttgtcctccggaaatagttatattctcttgcttgcctacataaaatgcggaataaccccacgaactattcggtatcactttcatgatacattcggggtccatcataatctcaaggttgccgggaacaatgatccccgcgtttcgaaacctctgattaagatctccgccaagcgttgcgtctattaaatatgttccctttggaaaccagacagtatgatagcctttcgaaacagctgtactgaggcactgattaatccgttctgtcgaatccgttttaccatctctaggaacaccgaaatccgctgcatttaatatgaattcagccaattgcgagcctccttctctatgattactatcatgttactcacaaaggcccgatctgcttgtacatttctctaaaattttattaaaaaaatataaaggaatagttgtgtaagaaaatctcacgataaaaagtttaaaaattaggaggaaatcactatttttaggtatttataatttttccaatatggaactatttgaaatgagtataaattatattgacacaagtattatataagaatatgatttttataatacactttttttagaaagggtttggctgacatggcttcgattgataacgaaagtatcattaaaagcgtcccgcaaaaagggttctttggtcacccgcgaggactatttacactatttttcaccgaattttgggagcgtttctcttactatggaatgagagcaatcttactttactatttgtatacagagacggtaaacggagggctcggctttgacaagggcactgcggttgccattatgtcgatttacggatcactcgtatacatgtccaccattattggcggatggctcgctgaccgggtattcggtaccgcaaacaccgtgttttacggcggcatattcattatgttcggccacattgcactcgcctatccgggcagttcgatagcattctatatcagtatggtgcttatcattgtcggaacaggcttattaaaaccaaacgtttcaagcgtagttggggatctttacacgaaagaagacccgcgccgcgactcaggtttcagtattttctacatggggattaacctcggtggtttactcgcgccgttaattgtcggaacactcggacagaagtacaactatcatctcggattcggagctgccgcggtcggaatgcttctcggacttatcgtatttgctttgacaagaaagaaaaacctcgggcttgcaggttccaatgtgccgaatccgctgtctaaaaaatctgcaattggcaccggaatcggtgttatcattgtggcgatcgcagtgattatctctgtacaaacaggcgtgctgacgatcaaacgtttcattgaccttgtaagtattctcggtattttgattcctgtgatttatttcatcatcatgtttacaagcaaaaaagcggacaaaacagaaaaatcccgtcttgccgcttacgttcctttgtttatcggtgctgtcatgttctgggccattcaggaacagggagcgaccattcttgcggtatacgctgatgaacgcataagactttcattgggcggattcgaacttcagtcatcatggttccaatcattaaatccattgtttgttgtcatttttgcgccaatattcgcatggctctggatgaagcttggcaaacgtcagccgtctacaccagttaaattctcaatcggaattattttagccggattgtcatttatcattatggtattccctgctatgcaaggaaaagaagcactcgtaagcccgctttggctcgttctcagcttcctgcttgtcgtgcttggagagctgtgcctgtctccagtcggtttatccgtgacaacgaaactggcaccagctgccttctctgcacagacaatgagtatgtggtttctgacgaacgcagcagcccaagcgatcaatgcccaagtagccggattgtttgataaaattcctgaaacaatgtacttcggcaccatcggtttgatttctatcgttcttggcggcattctcctgctgctctcgccggtgatcaaacgcgcgatgaaaggggtcttataatcagaaacagcccgcggatgttgatctgcgggctgttttttattgatcaagccatttcctgaagctttgatcaaaggcttccggttcttccagcatcggctgatggccgctcttttcaaaaataaccttatcaacatggggatataaaccgtcaacagcatcccatagcgaaacgggcgcaaccaaataatcatatctccctaatccgatatacaccggcatacgaacatcagctaaccgctgaagaagatcaatccgggcaaatgtattgccccataattcatcaatgatcggcatattcgtgaatacaccgtcccataaggcagcagcatgcggccgctcttgataaaagcttttcgcttcagcgcgaatacacatgtgcacaaagcgcctttcaggatctttgtcgatgtcctgcggcaaattctcgatgtctttttcaaagcgtttctttctctcaagactggctgtttccatgaaaaatgattcgctttttcgctgtctttcttcactgttatcaggcgcagtattaaagagcgccaccttccgaacttgtttgggatatgtcctggcatactctaaagccataaaagcgtgcccggaatgtcccaggatagtaacatcctcaagctgaagaaatgttctcatcctttcgatatcagccaagacagcatcaagcctcgaatcctccgcacgaagctcccgcttaggcttagcaaatcccctatggtcgacaaagacccattgatatttctgtttgatatctgaggaaaaaaggcgcggatagtaaaccgcactcccgatcacaaggatgggtgcgccctcgccctcaattcgataagctaaatcaaagccgtccgagtgacagatccccgcacgttccatttctcacgcccccttttgttttcattatataaaaaaagcctgacgcatggcgtcaggctatcgatattaccgttttaaatcttccagggtctttttccatctgctcagcacctcttcagggctgtgaagctgtatacggacacctgaagtcaaatcagcgtatttcgcaacgtcctctttcactgaaacgatgcggcaggaaaaacggtctctttcatattcggcatctttcaaaggcggtaaaggcgcgcattcaagctttacataataggccgctcccttccaccacgccgtgaactgtgcttttcctgtgcgaaggatgttggccgaagtcattgtgtttttccacagagcgattcggatatcagttcggctcagcgcgatgatttcacctgcactgatcatagcggcatgcggccagccatcctctgatactgtttgcagaacgaaggcctcatgctgcttctcattcaggcagctcccgtcaagcagctcaaagagacggtctgacatacagttcacgcggatcaagcctttcgttccggcaccgccggaacttcaattgctgtttctgtttcctttggatcaattttaaacgctggattgtatttttcgggatttgtaatgctttccggttcacaggatctccatgtaaaaaagcatgtttggcactgataaacttcccatgcgccttctacaggcgatttgctcatgacttctcccttttttgagtcgcatcgaggacatgtatgcatttcgaacatcctttccttatttattcattaagtccattagtttttgttcccattctttcgttgttagcggagaatcaagcggctgtgaataatggcctcttgtttccggcgcaaccggtgtagtggcgtcgagaatcattttgtgagtgattcctgatggattggatcccggatcaagcggcaggacagataagtccggaatgatgaccgcatcatgtttcggatgcattttggtcgaaagcgcccacatgacctgcggaaggttgaatggatcgacatcctcatcaacgactatgaccattttgcagtagccgagtccgtgcggcgttgtgagtgcgcgcatgccgaccgctttcgcaaatccgccatagcgggtttttgtggaaacaatcgcgattaaaccgtgtgtgtacatggcgttcactgccacaatttcgttcggatacgcttcttttaactgctgataaagcggcacgcatgtgttaatgccgatcatgtaatcgcattctgtccaaggcatgcctaagtataaatgttcaaagatcggattgtttctgtgatagacgcgtttaattttgataatcggcatgctgcgtccgccggaataatggcctgtgaattcaccgaacggcccttcatattcgcgctctccggcaataatctcaccttcaagcaccacttcagcgccccacggaacatcaagatcagacagctttgatttgacgatgcgatatggttcgccttgaatcgcacctgccatttcgtattctgattgatcatagagaagcggagtcgatgccgccgttgtaatgaccggctcacagccgagcgcaatagtgaccggaaggttgatgccgcgttcttcagcttggcgcagatggattgcaatatcgtgctgcgggacaggctgaatgccaaggcggtcttttcctttgacttgcattctgtaaatgccgacattttgtttgccgaagttgtcagggtcctcaagatcacgggaaatgacacatgctttgtctaaatagtagcctccatcaccctggttaattctgaaaagaggcagtatatcgaacaaattgatatcttctgtgatttcattttcatgaaatggcgctgtttcctcacgtttgaccggcatcggaaactggtcataacgctttgcgaattcaaaaaactgttcttttaccggtgtgtctttcggcatgcccagcatcatggcatggtttggccaagagccgatgacattcatcgcaattcgcgcgttatgatagccgtaaatgttgttaaataagagcgcagggcttttatcgccaagattgctggctgcccgtgcggaggcccctaaatccggttccggctttacctcttcattcactgtaagcagctgtccttctttttcaagggcagcgagaaattctctgaaatcttgataagccatgatcaagctcctcctttttgtttttcaatcccattccagcgcttcgcttcaggaagccgaatgccgaattggtccaacgttctaaaaacaatatggtcaaccatttcctctaagcttctcggccgattataaaatgccggcatcggaggaagaatgatggtgcccattttcgtaagcgctagcatattttcgagatgaatttggttcaaaggcgtctctctcgttaagaggacgagtttttttctctccttgagcatgacatccgccgcacgtgtcagcagattatccgccattcctgtgcgaatgcttgcgagagatttcatgctgcacggcgcaacaatcattccatcggtatcaaacgacccgcttgaaatggctgccgcctgatccttatgtgagtaagtgtatgtggccagttgttctacttcttgtaacgtatagcctgtttcgtgtttgatcgtgacgtttgcccaaggagacacaacgagatgggtttccactccggcggccttcagccactgcagcagcctgaccccgaaaatggcccctgttgcccctgtcattccgacaacgagtttcactttgccccctcctttacgcttgaattctgctttcatttcaatcatactcctgatatatccatatgaaaaatatctattaaatctataattaatacctaaaaggtatgataaggaggcgctttcttttggatattcgccagcttcgatacttcattaccattgcccaagaacagaaaattacgtccgcagccaaaaagcttcacatggcgcagccgcctttaagcaggcagctcaaacagctggaggacgaacttggtgttgttctgtttgaccgtaacaagaaaaaacaaatgactcttacatatgaaggagctgtttttctaaaaagagcaaaagagattctgcataggtttgaagatgcagtcattgaggtacaggagctgaaggaggaagtagccggtacacttgccgtgggatcaacgatttattgcgcggctctgatgcttgaaaaagtaacacagatcaaagagagatacccccatctcacctttaatatttgggaaaatgaacccgcgacactgttggaactgctggaaagccggcaaatcgatgcggcggtcacgacaacactgatcaaaagtgacacagtacaattcaagcagcttgatgacattccatgtgtgctcgtgctttcagatgaagccggatatccgtgcggagacaccattaagatggtggacattccttcatttccgctgatcctgctgcggcctgtcaacggaaaaggcgtctataatcaggtcatgaatgaatttcatcgtttgaacctggagccgcgcattgtttgtgaatgccacgactctgcaactttgctcagcctcgtgtcatccggattcggcgcgtctattttgcctgtcacaatgattcccgttcatatgagaaatcacgttcacaccgtccatatcgaaaataatcccttcattatgacaccggctgtcatgtggagaacggacagttatttgcctaaaccggcacagcaatttttggatttattttaaaagattttgtcttatgaaaaccaaatacttgactcatactaaaaaaaagttatcctttagatttgtaagctaattttttatttcaataaaatcaaccagaaaagtggggaataagatgaaaaaagcattattggctttattcatggtcgtaagtattgcagctcttgcagcttgcggagcaggaaatgacaatcagtcaaaagataatgccaaagatggcgatctttgggcttcaattaagaaaaaaggtgtgctcacagtcggaacggaaggaacatatgagccgttcacttaccacgacaaagacactgataaactgactggctatgatgtcgaagttatcacagaagtcgcaaaacgcctcgggcttaaagtcgactttaaggaaacacaatgggacagtatgtttgccggcctgaattccaaacggtttgacgttgttgccaaccaagtcggaaaaacagatcgtgaagacaaatatgatttctcagataaatacacaacatcaagagccgttgtcgtaacgaaaaaagacaacaacgatattaagtctgaagcagatgtaaaaggaaaaacgtcagctcaatcactgacaagcaactacaacaaattagctacaaatgccggcgctaaagtagaaggcgttgaaggcatggcgcaggcccttcaaatgatccagcaaggccgcgtcgatatgacatacaacgataagcttgccgtattgaactacttaaaaacatctggcaataaaaacgtgaaaatcgcgtttgaaacaggtgagcctcagtcaacatatttcacgttccgtaaaggaagcggcgaggttgttgatcaagtcaacaaagcattaaaagaaatgaaagaggacgggactctttctaaaatttctaaaaaatggttcggcgaagatgtttctaaataatctgccggcattgacgcttggcacggcgatcccgtgggatctggtgcagcagtcattctggccgatactttcagggggaatctactatacgattccccttacgattctttcctttatattcggaatgatcctggcgctgattacggcgcttgccagaatgtcgaaagtgagacctttgagatgggtgttcagcgtatacgtatccgcaatacgcggcactcctcttctcgttcaattgttcatcattttctatctgttcccggcctttaacgtcacattagatccatttccaagcgcagttatcgccttttcattaaacgtcggcgcctatgcatctgaaatcattcgggcatctattttatccgtgccgaaagggcaatgggaagccggctacacaattggcatgacacatcaaaaaacgctgttccgcgtcattttgccgcaggcgtttcgtgtgtcgatcccgccattatccaatacctttatcagcctgattaaagatacatccctcgcctctcaaattctggtcgctgagctgttcagaaaagcccaggaaatcggcgcgcggaatcttgatcaaattttagtgatctatattgaagcagcctttatttattggattatctgcttcctgctctcactcgtccagcatgtcatcgaacggcgtcttgaccgctacgtggccaaataaggaggttccgagtatgcttaccgttaaaggattaaacaaatcattcggtgaaaatgaaattttaaaaaagatagatatgaagattgaaaaaggaaaagtcatcgccatacttgggccttcaggttcagggaaaacgacgctgctccgctgcctgaacgctctggagatcccgaatcgcggagagcttgcatttgatgatttctccatcgatttctccaaaaaggtgaaacaggcggatatcctaaagcttcgccgaaaatccggaatggtgtttcaggcgtatcacctgttcccgcaccgcacagccctcgaaaacgtgatggagggccctgttcaggtgcaaaaacggaacaaagaggaagtcagaaaagaagcgattcagcttcttgataaagtcggattgaaggacaaaatggatttatatccgttccagctttccggcggccagcagcagcgcgtcggcatcgcccgcgcactggcgatacagcctgagctcatgctgtttgacgaaccgacctcagcgcttgatcccgagcttgtcggagaggtgctgaaggttatcaaggacttggccaatgaaggctggaccatggtcgtcgtgacccacgaaatcaagttcgcgcaggaggttgcggatgaagtcatcttcatcgacggcggcgttatcgtggagcagggaccgccggagcaaattttctccgcaccaaaagaagaacggacacagcggttcttaaaccggattttgaacccgctgtaataagaaaaacagagcgtcagcgccctgtttcagattattgacaaaatcctaaaacgatattcgttttaggattttgtgattttcagcgtgattgaaaacctttgaagtctaggaagggcgagcattggagcacagctaatgttaaattcgtgagcaccgaagcacaggcctgacaacgaatgcaagggtttgccaacacgctgaaacagggcgcctccggcggccctgtttttttgttgagcccctttcgcctattccgcccttctgtcagatgtgctacaatgacaatcgactgatttttacgaaagaagggacctcacgtgaagcaagaacttgttctgcgctggacattttattttgccggtttgatcattttggcttttggtgtatccctgacgatagaaggaaaagcactcggcattagtccgtgggatgcatttcattacagcctgtttcagcacttcgggcttaccgtcggccagtggtccatcattattggagcgctcatcgtcggattcacgtcattgtttacgagagcttggccgaaaattggtgccctcctgaatatggtgctcattggtgtatttatagattttttcaatttcattctgcctgccctctcgacctacacaggctcgatcatcgtcttctctctaggcgtggtgctgattggttacggcgtcggtgtttatgtatcagcaggccttggcgcggggccgcgtgattcactgatgatgctgattacagaaaaaaccggctggaatgtgcaatgggtgcggaacggcatggaattaaccattttgtttgcggcatggggcatgggcggaccgatcggttttggcaccattttgaccgccatcctcaccggacttattttgcgtttttcattgccccagtcaatccagttgctgaattatgctgtggcaaggcggacagccgcagtgaaagcatctccgcctgtacactaaaacaaagccgccttggctttgtttttttattttctcctctatatgagtcttgtggaagtatgataggatggttttgacaatcttttgcagacggaggatctagaatgaagatttacggaatttatatggaccgcccgctttcacaggaagaaaatgaacggttcatgtctttcatatcacctgaaaaacgggagaaatgccggagattttatcataaagaagatgctcaccgcaccctgctgggagatgtgctcgttcgctcagtcataagcaggcagtatcagttggacaaatccgatatccgctttagcacgcaggaatacgggaagccgtgcatccctgatcttcccgacgctcatttcaacatttctcactccggacgctgggtcatttgcgcgtttgattcacagccgatcggcatagatatcgaaaaaacgaaaccgatcagccttgagatcgccaagcgcttcttttcaaaaacagagtacagcgaccttttagcaaaagacaaggacgagcagacagactatttttatcatctatggtcaatgaaagaaagctttatcaaacaggaaggcaaaggcttatcgcttccgcttgattccttttcagtgcgcctgcaccaggacggacaagtatccattgagcttccggacagccattccccatgctatatcaaaacgtatgaggtcgatcccggctacaaaatggctgtatgcgccgtacaccctgatttccccgaggatatcacaatggtctcgtacgaagagcttttataaatggctcatcaacagcttgacaccgcgctcaatatcttccgttttcacattggaaatattgatttttaatagattttctttcggataatctgataaataatgacggtctatcgcctcaaggagaaccccttgtttttccagtctatgaatcactcttgaggcgggcagatcctgaggaagcaccagatgggtgtgcatacagggtgcctgcccgctggagaacgtaaagcgtccgcttcccagctgcctgtgagttcgaatggcttgatgtagcctcagcgaccgctctttataagaatctctgattttctccttatgcctgccgtacataccgcttttcaggtaaatctccaatgccgcttgagaaatcatcgaacagtcgatgtcgttcagctttttgtacgcatagaacgtgtcagtcagcgcttcgggcaaaacagccgcccccacgcggaggccggggaacatcattttcgagaagcttttcaaatagatgacatgtgaggacagatcatatgcgtacagcggatctgcctttttattttcctccagatcaccgaggtaatcatcctcaacgagatagacatcatacgcttctgccagtctcacaagctcctgtttatcacgctctgacaatgagcacccaagcgggttatggaagcgcggcatcgtataaaaaaatttaatcgattctgtttgaaataaccgctcaaccttggctatatcaagcccttcttccgttcgtttcaccccgatggcgggaatcccaagtgtctcaagctgttcgaccatcaaatggtagcccggctgttcaatggcgatcttctctttcccatttgggaacggcatggcacaaagcaaggataacgcctgctggacacctgatgtaatgaaaatatgccgttcatccgcaaatacctgttgagtggccaagagctttcggagtacgcggatgagtgatggaagcccctttggcgtcccataaataaacaaatcgtttttgtatgtatcaatcgctttgttgatgcagtgctgaaaatcaagatacggaaacacatcgggatccggcgcagatgtggcaaagtcgatggggccaggctgcccgctttttgatttccctgactttttcacaatataatagccgcttttcggaacagaatagataaggtggcgcttttccagctcctgcagcgcgcggatcactgtgcttttgctgacttggtagcgggcggacagctgacggatagatggaagcctgtctccttcttgatatgaggtgctttgcatcatctcctctatcctcgttaatagactcatatatttctccatgccttctccccctgttttgtaccggtacagttcattgtttttctcattgtaccgttctgaccgcggccatacaataaagggagcgaccggcgctgcaattcaggtaaaggagcccttcccattatggttaaacatcagcaaacccccgcttatatagcggctattttatattcgttcattatcggtttatcctttctattcgtaaaaatcgcactgcaaacagcagagccgtttgatattttggcgcatcggttcaccattgcgtttgctgcggccactgtaccgatcttattcggctgggtaaagctatcaatccgcgtaaaggacgtcattgacattttgccgctcgccctgctgtatcccgcgttatttttcagctttcaggcattcggccttgtgtactcgtcctcctctgaagcgggaattattcaggcagccattccgattttcacgatggtctttgccgcttatgttttaaaggaacgcccaacgtggacgcaaaaggggttcacggttttatccgttgccggcgtcatgtttatttttgtgatgaaaggcgttgacgtggaatcagccagcttaaaagggtctttgctgatcctattgtccgctttgtcttcagcgatgtacaatactgctgccagaaaaatgacgcagcggttcaagctgaccgagctcacctacatcatgtcagccatcggctttgtcgtcttcaacgccatcgcccttgtgcgtcacggagcggcgggaacagtcggcacttattttctgccgttccgggagcccggcttcgttctcgccattgtgtatttgggcgtgctgtcttcacttgtcacttcatttctgtctaactatacgctgtcgcgaattgaggcgtttaaaatgagcgcttttaatcatgtatctaccattgtgacgatgattgcaggatttgtgattctcaacgaaagcctggcctggtatcatcttgccggggctgtttgtattatgattggcgtggtggggagcaatatcaatctggagaaaaaaacaaagcgccctggtatgcctgcaaaaaaatgagaaattatgctagactaaaaggaaaaacatggttagaggtgtaggtttaccgtatgattcaatatgctagtgaaagtatcaatcttccaggagaaatcacttttaaggatgtaagagaaatctttttttatcaaatcgcaaaaatatcatgcttttactttctattgttttgcgccatatttgctgcagttaacttcattaacggatggccccgtatcgtttatggaagtgacgcgcttaacttgtttatgaacagtatgttgattatcgtgatgtccgttctgtttacactgctgctcctccttcttctatatgtgaagttttccagagcatacaagaagaacgaacggatgaaatccaaaagaacatatactctgaaccaagaaggaattcgtatatgttctaaaaaatatgacctcattttcaattgggatgaaattacagctgttttcgaatataaaaatatcttcagggtcaatacatcaagtggccaatatattgcgatccccaaacatttttttcactccgaagaggagatgaacagattcaaggagattatccttaaaaataccgaaacaaaaaaactcaaatttaaaaaggatcagcattgacagtgctgatccttttatattgaatggtgggtttcttttgccttctgtttatctaaaaacggcaccagctctattacagccgataaacccacaaacacgatgcacacagcgacaatcagtaaataaccatgagtcatgtcaaaaaacaaaccgcccgcatacacgctgagagctccggcaacctgatggataaagaaattgatgcctaacagcgatccgatcaatcctgtttgatagctttccgaaattgacgccgcggtcagcgggatcacgcctgtgtaactgagcccgaataacaggataaacccgaagtaccaaaggtcgctgtgatgaattccgagaatgggaatgagcaggcaaatgaggctgagcagccgaatgaaaaataagatggatagcatgacgcttctgctgccgaggagatctgacagccagcccgccaataatccgccaatgatgataaatgccccgaacgcggccatcattccgttgacatgagagacatgcgcatccttcagtatcgggacgaggtgagcatcaataattcccattgtaaatccgcaagtaaacacgccgaagtacaggatatgaatgaggcgggattgcttcatcacgttccaaaaccctcgccaatcataagattttttcacagtttccgcttgcgcatgtggcgggtgcttcatcccaaagacgaggagcggcagcagaacagccgccatgacgattcccaaaatggtataggtgctctgccagccggcatgatacggagccgcagcccaaatgggcgagagaagcagcaggcccgcagagttggcattggtcaaaatagcaagcgccagacctttgtgtgtgtcaaaccaacagctgatgaaatactgggtcgtcacgccgaccgcgcaggaatacccgattccgccaagcacaccgtaaatggcggaaaacacatgaacattcggtgaataaggaagcaccaaaaagcttgcgctgatgcaaacagctcccagcgccataatttttctgacactgaaacggtcgataaaaaaaccgacaaaaaactggacgatgccggttgtgatcataaaaatgctgacagaaaccgaaatcagcgacctgtcggcatggaaggcgtctgccattggcagcataaaaaattgaaaggaatttctgaatgagttcattccgatggcgaaaacaaacgtaaacagcaatacaaaccatttcatcctgggagacgtgcgcatgtttcgacctgcctttatttgagtatttcgactattataccatgcagaaattggcattcaacacaaaaaaagcggaacagccgaagctgtccgcttttgatcacggttgaatgatcggatgctgattcaagatcgcaaaaatccgttctgcgacttcttccgtttgtgacagcaggaacatgtgcccgccgtcaaattgatggaatgtgatgtcttttgcccacttcttccacccttccgcatctcgtatgcattttttatcatcaagcccgttaaagacatgaacaggcgactggatctgggccagatcgtaaagctcaaattgttcaagagcccggtaatctgatcggaaagaaggcaggaaaaaggacatgacctccttattttcaacaagctctgcgggcattccgcctaattggataatatgatcgagaaactgatcatcaggcaggtgggacactttcttccgctgaatatgaggcggctggattgcagaaatgataaccgcctgcggaaagatgccttcacgctcaagcttttgcgccagcctgaaggtgatcattccgcccatactgtgtccgaacagcacaaacggccgatcagggcgaaggttcagttcttgcttgtacaaatccgtcagctcttcgagatcctcaatggctgacgtttgattcgtgccgtgtcccggcggctcggcagcgagcatctcgcactccccctgcaaaaaagcatggagagggcgaaacgacgccgaatagccgccggcaaacggaaaacagatgagctgtgttttttccgacgcatcaaatgatttgaagagttggctcattggctgtctcctcctttcatcacttcatttatgaaaccgttacggtttgtgtattaagaaattcgagcaaaatctccgcattcctatctagcgtttcgccctgcagcatttctgcgtgtgttccgaagcctcttttcacacggtaaacacctgttgtagcttcttcccatgatgcaagccattccggcatgtcaaaatcagcgccggaagtcaacagatcaatatctgctttcacctggcctgtgctgatcaggttgacgtagtatgagtaaaaggcatgtgttttttgcttgaggccgtgtttgacggcttcgctgttgagcgcttcattgtcccgattgacattcatcaacgcttcgacatcactttcaaccgtgcgtccgtccagatcactgacaccttgttttttataggaatccaccatgatgatccgctgaacaatacggccttgttcctcaagctttttcgcagcttcaaacgccaggctgcatcccgctgaatatccaaacaatgttaaaggcccttccggctgcagcttctggatcaaatccgcatagcggtcaagccggtcttcctcctcaataaaatcaaaggcgcatagcttgtatgacggcaagcggctggacagattttggtacataaggccatagcccagaaccggcggaaatgcgaaaatgatctgctcctgatcctgattcattatcgttacatcctgcaagccatcagagcccccgtttttcaaatacgctgaaatgccggcgatcgtcggcgcttcaaacaaaagcttcactggaagatcaatcccgagctctttcttgatgcgggacgcggcggtcatggccttcaaggaatgccctccgagcgcaaagaaatcgtcatgaatgccaatttgctttctgccgagaacctcagaccatatttgtgcgattgtttcttccatctcgttccgcggtccaatccattcttccgccagctgatcctgatcaggttttgggagcagccgtttattgactttcccgttcgtcgttaaaggaagctcatccaagaaggtaaaggtttgcggcaccatgtaagcaggaagctgttttttcaggtgcgccttcacgtcttcagctgaaagctgcgttcggttcacaaggtaggcattgattgatgcatcgccagactcatggcggtccgccacaacgaccgcatctttcacacctgggtattcctgcagctgcttttcgatttcttcaagctcaatccggtgtccgcgtattttgacctggtcgtcaatacggccggcgtattcaatcgttccatccggcagccagcgcgctaaatcccctgtacggtaaagcgtttctcccggcttgaacgggttctcgataaacttttccttcgtgaggtcagcacgatttacatacccttttgacacgcccattccgctgatgcacagttcaccgaccgccccgaatggctggagctggctttgctcattcagaatataaacactggcattgctgatcggctttccgatcggcaatgaggagatggaatccggcagatcatgcacgacgtgagctgtcgcaaacactgttccctcagtcggcccgtagcagttaatcagcttgcccggccccatgatccgcagcgcttttctgacatgaggcactgacgcgcgctctccgccgaataatatacagcgaagccccttcatccaatcctctcccgcatctgtgagaagattaaatagtgcggttgtcgcaaacatgacattgacattctcttgcaggatcagatctgtgagccgttctgtatcaagcagcgtatgttcatctgcgataatgagccgtgccgcattcagcatagaagcatagaaatcaaaggtaaatgcatcaaaggcgtaattcgaaacagacaagaacgtatcctgatcagaaaatgccatgtagtctacatgcttgaccaatccttgaatattggcatgagtggtgatattgccctttggctttccggttgtgccggacgtgtacatgatatatgccggatcattaggatcaatcgcggttgcaggatcgcttgcctgttcttcaaaccgtgtttgatcatcaatgaagagcgttgtgcctgtatacggcagctcagccgcttgttctttcatctcctgatgcgtcagaagacaggctgccgcactgtcagccagcatatacgagattcggtcctctggcagcttcggatcaaccggcagataggctgctcccgcctttaatacaccgagaatgccgatcaccagttcaagtgagcgcttcgtgtacagcgctacaacagagcctttgcccgcaccgtgtttttgcagccggcgtgcaatgcggttcgcttcctcatctaattcgcgataagacagggtctggccggaatacgtaagcgccggtgcatccggattggcgttcactgcttccttgaaccaatacgtcagaggctttgtttcatgagcttgagccggcgggtttaagccggttagcaaaaattctctctccctgtcgtcaacgaggttgatcgtgctgacaggctgatcaggattctggatgagctgctgaattgctgtaagaagctgagatttcaagcgcaggataaacgcctcatcaaacacattctcattataggcaagcttaatcagcatctcatctcccggggaagccatcaggttgagatcataattcgacttctcaaaaacatgaacatccaccatatcaaagccgttttcactgctttcttcatttttcgcatcctgaagcggatagttctcaaaaacaatgatgtggtcaatcagtttcggctgatcggcctggctttggatgtcataaagcggcacatattgatgcggctcggactgcagcgattgctcctgcagccgcttgagcaagccgttaaatgtgataccctcagacagcttcacacgtctcgggacaacgttgataaacagcccgaccatatgttcaacgcctttgatttccgcgggacgccctgaaacaactgtaccgaaggccaaatcgccagactgctgatagcggctgatcaatacgctccagactgcctgcagcgccgtactcaaagtggtatgctgcgattttgcaagctcggtaaaggcctttgtttccgcctccgacagtgaaaagagcagctctttcggctcatagccgtccttttgtttctttctttgctccgcaaacgtcgtttgtccttcaaagccctctaaatattcgcgccagtaacgcagtgatgcttgtttatcctgcttttcaagccacttgatgtagtctttatacggtttgacgggcggcaggctgtacggcttttgttcgcgcagagcattgtataccttaaatagatcctgtacgacgatgccgaagcaccatccgtccaaaataatgtggtggtagctccacacccattcaaagctttcttcagctttcttgaaaatggctgcccgcatcggaatatcccgcgtcaaatcaaaacccctgatcttatcctgttctttgtactcattgattttggctgtttgctcgctgcccgttaagtgtgtcagatcgatttcttctatatggaactgccgttttttcaatacgacttggacaggcctttttactttttcgtgaatgaacacggtacgaaatacatcgtaccggtccatgatcacattcatgctttcttcaagacatttgatattcaagctgccttttactttcatcgtgatttgttcaaggtaaaagctttggccgggattcaggatggcatgaaaaagcatcccttcctgcatcggcgataggtaatacatatcttgaacctgatccttgctaaattgactcatatgtttcgctcccgccttctgtaattcccttgcgttttattttaaattctcctcaagcatgtcaaagatatctcccatctcgtccatttcaaggtcttcggcgctgaagtcgcttggtgtgaattccttgtcttctttttccgtgcaatggcggattagcatcaggaggttttctttaaaccgttccatttgctcctcgactgtagctctttcaaactccttctcattgtaggagcaggaaagcacaaaccggccgtttctgatcatgccgctgaagcttaatgcgtacagcgcctctgattctccgcttacttggcgccccatatcgaaagcggacggttcaaagaaatcggttttgacttcactgtcgaattggcccaaatagttgaagctgatctccggtgtgaagccctttgtttccgctgtttctgtgaaataacgaagaatgccgtagccaacacctttgtccggaatgcggcgcaggttttctttgactgttttgatcacagctgaggcatctgcgtcagatatgtcgagcacaacagggtattgtgccgtaaaccagccgaccgttctggagatattcacattcgggataatgtcctcccggccgtgtccctcaaggttaatgccaattttggccccctttgtccattctttcattgtcaaaccgagcgcgctgagaagaatatcgttgatttcagttccatatggctgatgaacatctgttaaaagatgcttagtgtcttctgccgttaattcacataggacagatgatgtatccttgacgatccgctgctctgtttcacaatccttaggtaaaggagaaacctgttcagcggcaatttgcgaccagtattcagcctgctgtaaaagatgcgctgattggctgaatgccgccagttcttccgcccaatccttgaaggagtttgttttttgcgggaagacaaggctctcttctttctcagcctgcatgtagcctgaagcaaagtcttcaagcaaaatccgccatgacacaccgtcgaccacgagatggtgtacagcaatgagcaggtgatccccagcttctgtgcgatattgctccgcctttaaaagcggcccgtttcgcagatcgagactgctttgcagcttgttcgcgagaagcttaatctggcttctcagcatctcttcatcggagccgtacagatccacgatttcgaagctgaccttgctctcaccgatcggtttatacacctgaacgatgtccccgttttcctcgcggtagaccatgcggagcgcgtcatgatgctcgatcagcgcctgcaatgttttctccacccgttcaggatcaaagccctttttggcgtgaagcatcacccctttacggataatgtctctcagacctggacggcgcccgaacattatgatctctatgttccggcaataacgtggcatgcgcgttttgcttacgacaaagagaaaaccgataaatataacgagcgtccgtggggcgctggtttcggtcagtcgtgctgggatgataagggaaactggcatggcatctatctgatggcctttaaagactcctttaataaatgggagccgattgggggctacggctgggagaaaacctggcgcccgctagccgacgagaacttccatgtcgggttgggctataccgccggggtcaccgcacgtgacaactggaactacattccgatcccggtgctgctgccgttggcctctatcggttacggccccgcaacgttccagatgacctacatcccgggcacgtacaacaacggtaacgtttacttcgcctggatgcgttttcagttttaactgaaaaaacgttacctgttggtgataaaacgcgcagccgttgattcataaacgataaaaatctgccagtgaaaattaacgcgactttagtcactttttatcaaagatccgctggacaaaaggtctcacaattgatgtactggtaaccgacacagcatttgtgtcgttttttaatgtaaaggtaattttgatgtctaagattaaaggtaacgttaagtggtttaatgagtccaaaggattcggtttcattactcctgaagatggcagcaaagacgtgttcgtacacttctctgcaatccagtctaatggtttcaaaactctggctgaaggtcagcgtgtagagttcgaaatcactaacggtgccaaaggcccttctgctgctaacgtaatcgctctgtaatccagacgcgtcagcaagaatttcaaaacccgctcactgagcgggtttttttcgttttgaatcagccaagcagatacattttcaggaagctggccacgatcagcacgcttaacaacaccatgcctgcgctcatcagactctgtttcattctgtcaccctcgttcagtactgcatccagagtgacagagaaaaattaagccaacattaacggttcggctgttaatgcgcgcttgcagaagaaaatagccaaaatgcgatccccgtcatcgcaaaggagccgagcatattgatcgccatattcatcagcgcccagccgatacggccttcctgaaagagaaaaaccgtttccgcagaaaaggttgagaaggtggttaacccgccgcagaatccggtggtaatcaggactttccacattgggtcaatgtgtgtcattcggttaaaccaggccagccccatgccaatgataaaggcacctatcaggtttgcagccagcgtccccatgggaatcgcctgatgcagggggttaaaccgcatactgagaaaccatcgcgcaacgctacccgttcccccaccaataaaaacggctaaaagtagttgtaacacgctaaatacctgctatttgatgtgtaagagaagcgagtttaacgccgtttatgatgaggggacaaatatgtatgttgcggtagggcaatttgcggtcacgcctgactggcaggctaacgcgttaaaatgcgtcaatctgatgatgcaggcccaacagaaaggcgcgtcgctgctggtgcttcctgaggcgctgctggccagggatgataatgacccggatttatccgtgaagtccgcgcagccgctggacggtgaatttttacagcaattgctcgcccagagcgtgggcaatacgatgacgacgatcttaacaatccatgttccctctacgccgggtcgggcggtgaatacgctggtggcgattcgcggcggagccatagtcgcacgttacgccaagcttcatctttatgatgccttcagcattcaggaatcacggcgcgtcgacccaggagaccgtgttccgccgctgctggagattgacggattaaaggttgggctgatgacctgctatgacctgcgttttccggagctggcactccatctggcgctacagggggcggacgtgctggttctgcctgccgcgtgggttaaagggccgttaaaggaacatcactgggcaacgctgctggcggcacgcgcgctggataccacctgctatgtcgttgctgcaggagaatgcggaacgaagaacatcgggcaaagcagggtagtcgatccgctgggtgtgacgatcgccgccgctgcggaagccccggatttgctggtagcggagataaacatagacagaattgcgcttgcgcgtcagcaattacctgttcttcgcaatcgtcggtttgcgccaccgcaattattgtgatgtttttttcaacaatgcttgattcaccttgttacagattgctattgtgtgcacgcgctaaatgaccgttaatacagtcaggttttggcgctgaatgcagcctgttttaagtaaagaaggtatctatgggtgagattagtattaccaaactgctggtggttgccgcactggtcgtcctgctgtttggtaccaagaagttacgcacgctgggtggtgacctgggggctgccatcaaaggctttaagaaagcaatgaacgacgatgatacagccgcgaagaaaagcgctgaggatgacgtcccggcagacaagctttctcacaaagagtgacagcaacgcctgagggcttgcgaaaaaaaaaaccggctcatgaggccggtttttttgtattactgtaaatgaatattacagcattatttaacttcttcgccttttgcctgcatatctgcatggtaggaggagcgaacaaacgggccgcatgcggcgtgagtaaagcccatcgccagcgcttcggctttcatctcatcaaactcgtccgggctcacgtagcgctgtaccggcaggtggtgacggcttggctgcagatactggcccagagtcagcatggttacaccgtggcggcgaagatcgcgcatcacctcgatgatttcatcgttagtttcacccagacctaccatcagacctgacttggtcggaatatgcggatgcgcttctttgaagcgttccagcagtttcagagaccagttatagtcagcgcccgggcgaacctgacgatagagacgcggtacgttttccaggttgtggttaaacacatctggcggcgtcgcggtcaggatatccagcgcacggtccatacggccgcggaagtctggcaccagcgtctcgattttgatgtttgggcttttctcgcgaatggccgtaatacagtcagcgaagtgctgcgctccgccgtcgcgcagatcgtcacggtcaacggacgtgataaccacgtaacgcagcgccatgtcggcgatggtctgcgccagcttctggggttcgttagcatcaggtgcgaccggacggccatgagcaacatcgcagaacgggcagcggcgggtacagatagcacccagaatcataaacgtcgcggtaccgtgattgaaacattcagcaaggttcggacaagaggcttcttcacaaacggagtgaaggccattcttgcgcatcgccgctttgatcccctggatacgcgaagagtcggccggaagtttgattttcatccattccggttttcttaacagcgcctcgcgctctgtagccacgtttttaaccgggataagggccattttatcggcatcgcggtatttaacaccgcgttccatcacaatgggtttactcatagcgtgcgtgttccagttgcgaatatcgaaggaaagcgtttcaattcaagggaatgttgtatttatcaactatttttgaacgaacgacaggcagtatatcattgaaacggtcgttaaagcagcctgccagatcgccaatttgtaaaatagttgttgttttgtgccttttgccctgcctgtcgcaggggcttatgctggctcaacctgtcagaaggtctgacggataatgcggatgacgttttccagaaccggatcgcgcaagctcagcttgttgtaatgcagtgaaatttcaatagattccgcattaagctggctgagggggatactgtccagcggccagcatttccggagcaggctgtacaggcgcgatggcatgatgcacagcatatcgctgctgcctatcagggatgcagtggtgaacatattgtaactgctgaagctgatctgacgttccgggaaaatttcatcaatacgctgacgaaggccatggttggactgcccttcggtcatgaaagacgagtggtcgtagttgcgcaggttttcgatggtcagcggctcgctgagggcaggatgctgctgacggcaaaccagtaccaggttatccgcatagagcacattttgccccagcgctctggcactgaagctgccgctttcaataatcaggtccgtctggaactgggcaagctgaacgtcaggctcatggagaggtacattgcgaagcaggagctgcggagcatgctcttttacggcctggaagatcgcaggcatgaccagcacacccaccgaaggggaacagccgatggtgatggttctctgcttatcgtagctcccggttaaatccagtgcgcccagaatcgactccagcccctggctgatgtactcatggagatgcgtggcgtaggccgtcggcgttaccccctggcccttacggataaataacgggtcaggaaatatagcgcgtagcttttggatggactggctaattgctgatggcgtgagattaagaattttcgcagcgttaacgatacccttatggacatatactgcctcaaaaatagtcagtaaattgagatcaatattacgtaaagtccgaaaaatttgcggcttgtcttcgccaccaggttcattcagtcgtttggctggtaaattattatactccacgctttcactccgtatacattcacaatatgaatgatagttgaatttatttattatgcttgtagagattcgtaaagtgttggttttgtttcatttgtttatcaaaagcaaacacttgtgtgataattgctcacgttacttatgccgtgtttgccgtgcatgctggaggctaaataatatgtagcggtaatattcgggcgcttcgaaaatatagaatctatggattattgtaaagtgcaaaaacggtaaatagacagtggcccgtcaaattagcgagccctgttgtacgatatattaagcagggatatattcgtgcgggggattgttaagtagtgctaacacgttctttaacagcacgggacgaatcgtgtctggcgtagcggtttctacccactggcgcatttgcgtcatttccatgccggcgtagccgcaggggtttatgcgctggaaaggcgcgagatccatattaatattcaaggccaggccatggaatgagcagcctttacgaatacgcagccccagagagcagatcttcatttccccaacgtagaccccaggcgcatcggcccgcggatgcgcgtcaatcccgtattccgccagcgtattgacgactgtctgttccagtaaggtaaccagttcacgcacgccgagctttctgcgcttcagattgagcaggacgtacattacctgctgcccgggaccatggtacgtgacctgaccgccgcgatcgctctggataaccggaatatcgcccgtcattaataaatgttctgcttttcccgcctgaccctgcgtaaagaccggcaggtgttcgaccagccagatctcatcgggggtagtgtcatcgcgtgaatcggtgaagtcatgcatagcctgggagacaggctcgtaaggttgcagcccgaggtgacggaccagaattttatcctgatacaaaactgcgtctccgaagacgagggacaaaaggtatgcgggagtatatcacagcggggagaggggttacccggcaaaccgggtaaccgcaaagggactacagcaccatacgaacgatttcgatattgccgagctcttcgtacagcgtctcaacctgctcaatgtgtgtcgcagtgatggtaatagaaaccgagtggtagttgcccttgctgcttggttttactgacggagagtagtcacccggcgcatggcgctgtaccacttcaaccacctgatcaaccagctcaggtttcgccagacccattactttgtaggtaaatggggtagggaattcaagcagttcgttaagtttggttttcatgtcagctccggcgtaacgtcaaaaaataataactcccacgtcaggtgggagttatcaggatacttagtatatggggatcaaaatcacactttcaagtgttcgatttttaaccaaaccagtggtggaacatcaatttaatataatcaatgattttgccgaagaaattgccttcaggaatttcttgcaggaccaccagcgggcgctgatcgatcgttttgccatccagctggaagttgattgtgcccacgacctgatttttctgcagcggggcgtgcagctcggtgctgttcaggacgtagctggctttcagatccttcatacgaccgcgcggaatggtcagatagaggtctttatcaacgccgagagaagcacggtcgttgtcgccgaaccagacgggttcagacgcaaactctttgcctgctttcagtggattcacggtttcgaagaaacggaagccccaggtcagcagcttcttgctttctgtttcacggcctttaaaggtgcggccacccatcacggcagagatcagacgcatctggccttcagtggcggaggcgaccaggttgtagcccgctttgtcggtgtgaccggttttgatgccgtcaacgttcaggctgttatcccacagcaggccgttacggttggtctgacgaataccgttgaaggtgaactctttctctttatagatagagtactcattaggaacatcgcggatcagcgcctgaccaatcaacgccatgtcacgtgccgagctgtactgaccgtctgcgtccaggccgtgtacggtctgaaaatggctgtttttcagacccagcgcgttcacgtagctgttcatcaggcctacgaaggcatcctggctaccggcggcgaaatcggccatcgccacgcaggcatcgttacccgactgcaggttgataccgcgaatcagctgggaaacaggaacctgcatacccggcttcaggaacatcagagaggagcccttaaagaccgggttcccggttgcccacgcatcgttaccgatggtgaccagatccgtttctttgaatttacctgccttcatcgcctggccgataacgtagctggtcatcattttggtcaggctggccgggtcacggcgggcatcggcattctgttctgccagcactttgccagagttgtaatcgatcaggatgtaggattccgcgtcgatttgcggaacgccagggatcatggtcttgatattcaggtcatcggcgtgagctgcagagagcgcagccgcgcaaagggccgtggtcagcgccatgcgctgcacaaaacgagcagaaaaagtggtcttcatggtcagaactacgacatccgtgatggaattaaaaaaagtgccttactatagcaaatgctattcaggcaggcatccgactttaagcatgagtttgtgaatgtgttttacacaaactgacaattcggataccgccggttaattatttcgcaacagcgataaatgactgaagctgagcttcattctgcagacgctgctgcagggaggctgcctgcgatttgctggcaaacggccccatctgaatgcgccagacagcaccgttctgctcaacgcgtcctggtacgccaaactgctggctcagacgctgctgatactgtttagcccgggcctgatcgctcacagcaccgacctgaaccacatagctgccgctggccgctgttggagccgccaccgcggcactttgcgtggccgcgggcgccgttacgggagccgactgggtcgctggtgcagcaacgggagcgggggctggggtaggttcactgccttccagcacgcccgaggctaaggtcgtcggtgcgccaagaaagccgctgctctttaccggtgcgcccgttgaatcgtcgctttgcagcgtgtcgttgctgattgggcgtatttctccccccggctgagcaggctcggccggagaagagacgctgcccattcccccgtcaagattggggcggtcgggaagggcataagtctgtttcgccaccgtcgtacacgcggtacccggcccggagagggagccatcctgcgccacgataatcgggtcaatacggactttggtgttgttcgaggtattcaggcgatcggcagatgcgcgcgacagggagatcacccggtcatttccgtacgggccgcggtcgttgatacgcacgacgatcatgcggccgtttgccaggttggtgatacgagcatagctcgggatcggcagcgtcggatgtgccgccgtcagctgcatggggtcgaacgtctctccggaggccgtcaggttactgcctggctcggcatcataaatggcggcaaagcccgcctggctgaaacgggaaggatcctgaacaattttatagcttttgccgtcgcgctcgtaatcctgattggcactggcattcagcggttcataaacgggatcggcaccgctgatttctacgatcgggccattacacaccgcaggctgcggcggcgcgacggttgcctgttgctgaccatcatcactagtacaggccgcaagtaaacttgccgcaatgcagatccccagccactgcttacgcattccgatccccttatttttatacgctttttgacaacatttttctgtgggtatggatcgacatcacgataccaaacccggccatcaacacgatcagtgccgagcctccgtaactcaccagcggcagcggtacgcctaccaccggcagaataccactcaccataccaatatttacgaagacataaacgaataaaatcagcatcaacccgccagccatgacgcgaccaaaggtcgtttgcgcgcgtgctgcaatccacaatccccgcatgatcagcagaacgtatagggccaggagtattaagatgcccaccagccccagctcttccgccagaacggcaaagataaagtcggtgtggcgttccggtaaaaattccagctgcgactgcgtgccgtgcagccagcctttaccgcgcaggccgccggagccaatcgcaatcttggactgaataatatgatagcccgcgcccagcggatcggtttccggatcgagcagcatcatgacgcgctggcgctggtaatcgtgcatcaggaagaaccagagaatagggatgaacgccgcaatcagcactaccgcgataccaatcaggcgccagctcaggcccgacaggaacaggacaaacaggccagagagggcgatgaggatagaggtacccaggtcaggctgtgccgcaaccagcagcgttggcaggaaaatcagcaccagcgcgatggcggtattcttcagcgacggcggacagacgtcgcggttgataaagcgtgccaccattaagggcacggcgattttggcaatttccgaaggctgaaagcggacaatgcccaaatccagccaacgttgcgccccttttgaaatggccccaaaggcatctaccgcaaccagcaaaataatacagaagatgtagaggtagggcgcccagccttcgtagacgcgcggcgggatctgcgccatcaccaccataatgatcaggcccatggcgatctggccgattttgcgctccatcatcccgatgtcctggccgctggcgctccagataaccagcgcactgtaaaccagcagggccagcaggatcagcagcatggctgggtcgatgtggattttgtcccacagcgattttttatttggattatccgtcatgattattggtcctccgccgcagcggcggccgggttttcagccggcagttcggtgttgttatcacccagcataatgtggtcaaggatctggcgcatgatggtccctactgcaggcccggcaccgccgttctccagaatcatcgccaccgcgacctgcgggttgtcataaggggcaaacgccgtcatcagcttgtggtcacgcagacgttcggcaatgcggtgcgcgttataggtttcgttggctttcagaccaaagacctgcgcagtaccggacttcgccgccactttgtacggcgtaccggcgaaatacttgtgggcggtaccgttggggcggtttgccacgccgtacataccgtctttcgcgatctcccagaagccggaatgaatgtcacccaccggcgcttcgtgcggctggttccacggcacttttttgccgtcttcaaccgtactctgcagcaggtgaggcactttcaccacgccgtcattgatgaggatcatcatggctttgttcatctgaagcggcgttgccgtccagtaaccctgaccgatacccaccggaatggtgtcgccctgataccacggttttttaaagcgcttcagcttccattcgcgcgtcggcatgttgccggagcgttcttccgccaggtcaacgccggtgtagtgtccgtagccgaatttgctcatccattctgacaggcggtcgatccccatgtcatacgccacctgatagaagaaggtatccgcagactcctccagcgatttggtgacgttcagatgaccgtggccccattttttccagtcgcgatagcgcttttctgaaccgggcaactgccaccagcccgggtcaaacaggctggtattgcggttgatgacgccagcactcagtgcagagaccgccacgtacggtttaaccgtggatgccggcgggtaaaccccttgcgtcgcgcggttcaccagcggcgtgttggggtcattcagcagaccggagtagtctttactggaaatgccgtcaacaaacaggttcgggtcatagcttggcatagacaccatcgccaggatgccgccggtgcggggatcggtgaccacaacggctgcgcggctgcccgccagcagggtttcaatatactgctgaagcttaaggtcgagggtcagatagacgtcatgccccgcctgaggcggcacttctttaagctggcgaatcacgcggccacggttgttaacctcaacctcttcatagccggtttgcccgtgcaggacatcttcgtagtagcgttcaataccgagcttaccgatgtcgtgcgttgcggcgtagttcgccagcttgccgtctttatcgaggcggtcgacgtctttgtcgttaatcttggagacgtagccaatcacatgcgtcagcgcggatccgtaagggtagtagcgacgcttgtacccctttacttccacgccggggaaacggtactggtttaccgcaaagcgggccacctggacttccgtcaggttggttttaaccgggatggaggtgaatcggtgtgagcgggcgcgctcttttttgaaggcggcgatatcgtcgtcgttaaggtcgacaacgcttttcagcgcttccagcgtatcctgaacattatcgactttttccggcatcatctcgatttgatagatggtgcggtttaacgccagcggggtgccgttgcgatcgtaaataatgccgcggctgggcgcgataggcaccagcttgatacggttttcgttggaacgcgtctggtagtcggtaaaacggacaatttgcagattataaaggttggcgatcagcacgccggtaagcagcaaaatcccggtgaaggcgaccagcgcccggcgcacaaacagcgcggactcagccgtatagtcgcgaaaagaattctgtagtttcatccgctgcttaatctaccctggtcagtcattactcgcggtgataggggtggttggtagtaatgctccacgcgcgatacaggctttctgccaccagtacccgaacgagcgggtggggaagcgtcagcgcggagagggaccaactttgttctgctgccgctttgcaggcaggggataacccttcgggtccgccaatcaacagactgacgtcacggccatcctgcttccagcgctccagttcgtgcgccagctgcggcgtatcccagggttttcctggaatatcgagggtgacgatgcggtttttgccagcggcagccagcatcagttcgccctctttatcgagaatacgtttgatatcggcgttcttgccgcgcttaccggcggggatttccaccagttcgaacggcatgtcttttggaaaacgacgcagatattcagtaaaaccggtttgtacccagtccggcattttggtgccgacggcgaccagctgcaacttcacgcattaaccccagagtttttccagctcatacaggcgacggctctcttcctgcatgacgtggacaatcacatcgccgagatcgacaaccacccagtcagccgtcgcttcaccttcaacgccgagcggcaacagccctgcagcacgtgattcctgtaccacgtgatcggcaattgaaacaacatgacgtgtggacgtaccggtgcagatgatcatgcagtcggtaatactggatttacctttaacgtcgatagcgatgatgtcctgacctttcaggtcatcaattttgtcaataacaaaatcctggagtgctttaccctgcaagttttccccctggggtgaatgagattgtaaaacgttgaattcgtagccagacagtatacctgaactcatgcctgtgtcgggacaaaagtctccggtcgggcttttgaaggcgggtatcatcccaccctctgcctgagattgcatcgccatttttgtaaaacaatttctgtaaagcaatcatcggcgggaaagtctggcagcggagaataacagtatggcttaccctgtcaaggcaggataaacaataagccgctttttatgccctccggctattcatctgcgcttttctgatacaaaccatgcgtatggatataggccagcaccggtgcggggagcagatcgtcacacgctaaaccctgctgtaagcgctcgcgaatgagggttgcagagatatcgaaccacggcgtttccgccagataaatcttcccggcaggctgagcgtggagatcttcaacattggcggtgagatgatcttccagccactgctggtactgcgcttcgcgcatggtcagtggatagccaggacggcggcagacgagcaggtggctgttctccaggatggtttcatatttatgccatgtggggaagttcagcagggagtcctgtccgatgataaaagccagcggctggtctggaccttgttctgcgcgccactcctgaagcgtctgcgaggtccaggagggcgtatcgcgacgcagctcacgctcgtcaagccggaagagcggcttatctgcgatggccagggcaagcatctcttttcgctgctcgctggtcgcctcaggctgtggacgatggggcgggacattattgggcatgatggtgacgcgctgaaggccgatcagattcgccagaatttcaaccggcttcagatgcccgtagtgtaccgggtcgaaggtgccgccatacagggcctgtaaagagtgcatactatccatcaataaaaacgtctgccagcgccttgtggcagagcagcagggaaaggctttccagctccgcccagaccgactggccgtaatcttgctttagcgtaagctcggcgcgcatcagaagctgtaccgcctggcgaagctgttcatgactcaggcggttgacggcctcggaagtcaaagcccggcgattttgccacacccggtgtttatcaaacagcgaacgcaaaggcgtatgggcagactgacgcttgagcgtaatcagcagcagcagttcgcgctgcagggttcgcagcagaataaccggttcgctgccttcgaggcgcagctgctgcagaatatgcagggcgcgtttactttttgccgacagcagcgcgtccacccagtggaacggcgtgaagtgcgccgcgtcgttaacggcctgctcgacgcgcggcaaggtcagcttgccatccggccagagcagggagagtctgtccagcgcctgcgccagggccagcaggttaccttcatagcagtagcagagcagctggttcgccgcatcatccagctgaaggttgtgctgtttcgctctcgcggcgacccatttaggcagatgcgcctgctcaggcgtctgacaggtgaccaacaccgcgtggggcgcgagttgggtaaaccatgccgcgttttcctgcgctttggtcagcttgttgccacgcacaatcaggatcagatcgctgtgtaagaggctgaccagcgtagcgagctgctcgttcatcgccgcgttaggcccgttttccggcagcaggatctgaatcgtctggcgtgatgcgaacaggctcatcgcctgacagagcgagaagagggcgttccagtcggtattgttatccaactggacggtgtggtgttcatcaaagctctgcgcggcggcgacatgccgcacggcatccaggctttcctgaagtaataacggatcgtttccaagaagcagatacgccgcgcgcagcccttcattgagctgcgcgcggagttgttcaggatacagcctgatcatcatttacccagagagttagcagcaggaagcgtgccatcaaccggtttatcaacaatgtcagatccttgtttggttgacgctgcaatacttggcagtttacggatcagctgctccgccgccttgtcgtacatttcgttgatgataatctgctgttcggcatcttttgccagcgccgtctgcgggttatcgaagaacgaacggtacactttcgtgctgatcggatagatatctttacccgggatcaggactgccgcgttgaccgtcaacaccatttgatactctgcggtacggccatcctggaagatagacgcagtgtctctcgacagaccacttcctgtcacacgcagagacggtacatcctgacgcagcgtctgtttctcaacaagctcaacgccgttcagacgcagctgattgcgaattgcccggctgagtggaccgttcggatccccggaatcaaagatcatggttttcatctgagcaggcaccgccgtggtattgcgcaggtgccagccgcagccagcggtgacaagcaccgccagagataagagtattgttgccagttgtcgcacgtttcctcccgcgcttagccaacgaccagattcagcagtttaccaggtacgtagatcactttacgtacggtaacgccctcaagatatttagcgaccagtggttcctggcccgcgcgctcgcgaacctgttcttcggttgcatcgaccgccacggtaattttaccgcggactttaccgttcacctggaccacgaccagcgtggtgttttccaccatcgcggcttcgtcagcctgcggccacggcgcgttgtcgatatcgccttcgcctttcagctcctgccacagggtaaagctaacgtgcggcgtgaacgggttcagcatgcgaacgacggccagcagcgcttcacgcattaaggcacgatcctgctcgccgtcctgcggggctttcgccagcttgttcatcagttccataatagccgcaattgcggtattgaaggtctgacgacgaccaatatcatcggtcactttcgcaatggttttatgaacgtcacgacgcagcgcctgctgatcttcagtcagggcagcagcgttcagcgccggggcatcgcccagtgaggtgtgctcgtaaaccagcttccagacgcgtttcaggaagcggtttgcgccttccacgccagactcctgccattccagcgtcatgtctgccggagaggcaaacatcatgaacagacgcacggtatccgcaccataacgctcaaccatcacctgcgggtcgataccgttgtttttcgacttggacattttgctcatgccggtgtagaccagctcgtgaccttcagcgtctttcgccttcacgatacggcccttctcgtcgcgctcaacgattgcgtcaaccggagatacccagttacgctcgccgtttgccccgacgtaatagaaggcatccgccagcaccatgccctgacacagcagctgttttgcaggttcgtcagagttcaccatgcccgcatcgcgcatcagcttgtggaagaagcggaagtagagcaggtgcatgatggcgtgttcgataccaccgatgtagatatctaccggcagccagtagttcgctgctttggaatccagcatgccgtcctgatactgaggacaggtgtagcgagcatagtaccaggatgactccataaaggtgtcaaaggtgtcggtttcgcgcagcgcgggctgaccgttgacggtggtttttgcccactcaggatcggctttgatcgggctggtgataccgtccatgaccacgtcttccggcaggatcaccggcagctgatcttccggcgttggcatcacggtgccatcttccagcgtcaccattggaattggcgcaccccagtaacgctgacgggaaacgccccagtcgcgcagacggaagttaactttacgctcgcccacgccaagggaggccagcttgtcggcgatagcgttgaagccctcttcgaagctcagaccgttgaactcgccggagttgaacaaggtccctttttcggtcagcgcttgttcggacaggtctggttcagaaccgtccgccgtcagaataacaggcttgatggtcaggccatatttagtggcaaattcatagtcgcgctggtcgtgacccggaacagccatcacggcgcctgtgccgtattccatcagtacgaagttggcggcccagacagggatcgcttcgcccgtcagcgggtgaatggctttaaagccggtatcaaccccttttttctccatcgttgccatatcggcttctgccactttcgtgttgcggcactcgtcgatgaaggtagccagttccggattgttttctgccgctttctgcgccagcgggtgacctgcggccacggccaggtaggtcgcgcccatgaaggtgtccggacgggtggtgtagacggtcagggtctggtcgtagttctcaacgttgaaggtaatttccacgccttcagaacggccgatccagttgcgctgcatggtcttaacggtatctggccagtggtccagattatccagatcgttcagcagctcatcagcgtaagcggtgattttaataaaccactgcgggatctctttacgctctactttagtatcacagcgccagcagcagccatcgataacctgttcgttcgcgagaacggtctggtcattcgggcaccagttaacggcagaggtcttcttgtacaccaggccttttttgtacagctcggtgaagaatttctgttcccagcggtaatattccggggtacaggttgccagctcgcggctccagtcatagccaaagcccagcattttgagctggtttttcatgtacgcgatgttgtcgtacgtccacggtgccggcgccgtattgtttttgaccgccgcgccttccgcaggcagaccgaacgcatcccaaccgatgggttgcagaacgtttttgcccagcatgcgctggtagcgcgcaatcacatcaccaatggtgtagttacgcacgtggcccatgtgtagtcgaccagaaggatagggaagcatcgacaggcagtaatacttctctttgctctcgtcttcggttacttcaaaggtgcgcttctcgtcccagtgttgctggacttttgattctatctcttccgggcggtattgctcttgcatggcagccagtggtcctgtgttcaatacagctacaaatgtagccaatggatgtggtaattcagatccgcatagcatagcccaaacgcccgcgtcaaaacagcctttcgcacaaatgcgctttgcaggaatttaccgggtctgtgcttcacctgacaaagcggcgctgaaataaggtctattattagaaatagttacttacccgggaggcaatatgatgaacaaggttgctcaattttaccgcgaactggtggcgacactgacggaacggctgcgtaacggcgagcgtgatatcgacgcgctggtggagcaggcgcgtgcccgcgtgtcgcaaacgggtgagttaacgcgaaccgaagtggaagaggtgacccgcgccgtgcgtcgcgatctggaagagttcgcgcgcagctaccaggagagtcaggaggaggtcacggacagcgttttcatgcgggtgattaaagagagcctgtggcaggagctggccgatatcaccgataaaacgcagctggagtggcgtgaagtctttcaggatttaaaccaccacggtgtgtaccacagcggtgaagtggtcgggctgggaaatctggtgtgcgagaattgccaccatcatattgcggtgtatacgccggaggtcctgtcgctgtgtccgaaatgcggccacgatcagttccagcgtcggccgtttgagccctaggtaaaagcacaggtttgcgccctctccccgtgggagagggccggggtgagggcatcaggccgcagagtagtaagccagtctctccgccagcaaatccacaaacgcctcacggtcaatatccaccatcaccgtggtattcggtttattccccgtcagcgagtagtagtccaccaccgtcatcccctgggtgtatttcccctgcgtttcgacgccaacccacctgtggactgtggtaaacatctccggttttaacagccaggcaatggtgcacggatcgtgcagcggcgcgccgtggaatccccatttctcggctttgtgatactccataaagaagtcgagcagctcagccacggctgtcgcgaccggattgccaacggagcggaagcgctcaatgtcgtctgccataatctgcgcgcgatgcgtcacgtccagccctgccatcacaactggcaggcccgactggaagacgatttccgctgcttccggatcgacaaaaatgttgaactctgcggaaggcgtccagtttcccaggcccatagccccgcccatgatgacgatacgagcgattttgctgtgcagttcaggatggctgttcagcagcagcgcgacgttggtttgcggtcccgttgccaccagggtgacgggttccgcgctctcgcgcagcacctttgccatcagctccacggcggtgcagctttgcggcgtgaagccaggttccggcagcgccggaccgtccagcccgctttcgccatgcacgttatccgcaataattaattcacgcatcaggggcttgagggcgccgccggcgacaggaatatccgtgcgcttgagcagcgtcagcatgcgcaaaacgttacgcagggttttatccggcgtctggtttccggcagaagaggtgacggctttgacgtcgagctcgggggaggcaagtgcaaggacgagcgcgatcgcgtcatcatgacccgggtcgcaatcgaaaattataggttgtgccatagcgttctccattcatagcgttattttgtgacaaggttaacgctgcaatggggcacggacgagaagaagtgagcgaaagcgtgaggcagtgcgcaatccgcagattgcgcaccgagaagattagtgcaggattttcgcgaggaaatctttcgcacgttccgatttcgggttggcgaagaactcctctttcggggaatcttcaacaattttcccttcgtccatgaagatcacgcggttggccaccttgcgggcgaagcccatttcatgggtcaccaccatcatggtcatcccttcgtgcgccagctcgaccatcacgtccagcacttcgttgatcatctccggatcgagcgccgacgtgggctcgtcaaatagcatcgccacgggatccatgcacagcgcacgggcgatcgccacacgctgctgctggccgccggatagctgcgccgggaacttatcggcatgcgcagagaggccaacgcgttccaggagcttcaggcctttctcgcgcgacgcttttttatcacgcttgagcactttcacctgggccagcgtcaggttctcaataatggagaggtgagggaacagctcaaaatgctggaacaccataccaacgtgagagcgaagctgggcaagattggttttcttgtcgttgactttggtaccgttgaccacgatctcgccctgctggaccggctccagaccattgacggttttgattagcgtcgatttaccggaaccggacggtccgcacaccacgaccacgtcgccttttttcacttcggtggagcagtcggtcagcacctgaaagtgcccataccatttagaaacatttttcagggaaatcattgtaccgtccttttcttcagccagctgaccaacagcgacgcgcttaaactaatcacaaaatagaccgctcccgcaaagagcaccatctcaacctgcgtaccatcacgctcaccgatggtggacgcggtacggaagaagtctgccaggctcagcacgtagaccagggacgtatcctggaacagcacaattccctgggtcagcaggagcggaaccatggcgcgaaacgcctgcggcagaataatgagctgcatggactgccagtgcgtcatccccagcgccaatgcggcactggattgcccgcgggagatactctgaatgcccgcacggataatctccgagtagtaagcggtctcaaacatcgagaacgccaccatcgccgagatcagacggatgtcggttttcggcgacaaccccagcacgttttgcaggaagccgggcacgatcaggtaaaaccacagcagcaccattaccagcggaatggagcggaacacgttaacgtaggcggtcgcgaaccaggcgagcggcttaaagctcgacaggcgcatgacggccagcagggtgccccagacgataccgacgataatggcaatgacggtgatttttaaggtaatcatcagtccatcaagcaggtaaggcatggatggaacgatagaactccagtcaaattcgtacattatttgccccccatgttgcccggcaggcgaattttgcgttcaaccaggttcatcaccagcatgatgaaagcgttaatcagaacgtaggcgagcgtgatcgcggtgaaggattcccacgcgtgagcggagtaatccagcagcttgcccgcctgcgcggccatatcgaccaggccgatggtcgaggcgatggccgagtttttcaccaggttcatcatctcggaggtcatcggtggaacgatgacgcggtaggcgttaggcagcagcacgtagcggtaggtttgtggcagggttaaccccatcgccagacccgcatttttttgtccgcggggtaatgactgaatggcggcacgcacctgctcgcaaacgcgcgcagcggtaaacagccccagacacatcatggaggagacaaagaactgcacattcggatccagttccgacttgaaccacatgccaatattttccggcagcagttccgggataaccagataccaggtaaagaattgcacgatcagcggaacgttacggaacagttccacgtacagggtgccgagtgttgaaagaaaacggttagggacggtgcgcagaataccgaacagagaaccgacaagaaacgcgatgatccacgccgttatcgataatgccacggtgacctgaaagccgctccacagccagccaagataggtggtgttgccgaacggggcttgttgcaggaatatgccccagttccagtcgattgacataataaactccagaaaaaaaagggtagcagcgctaccctcgaagattggtgagaagctcatttttcgcgctgagtggggaacgaccactcaacgtatagtctgtccatgcttcccgacaatcgagagggcaggagatcccgcccctgttgttctaattagttaagagccttgtcatttggagatttgaacagcgctttcatgtcgtcagacagttcaaaattcatgttcaggttttttggtggaatcgggttcttgaaccatttgtcgaaccatttttccgcttcgcctgaggtctgcacctgggcgatggtgtcatcgatcagctttttgaactgcggatcgtctttacgcagcatacagccgtaggcttctttcgactgcgcggtaccgacgatatcccagttgtctggtttcttcgctttcgcacgctcgcctgccagcagggcgtcgtccatcataaacgcgacggcacgaccgctttccagggtacggaaggagtcgccatggtctttcgcgctgatgatgcgcatatccattttcttctcgtcgttcagcttgtgcagcagcacttcagacgtggtcccggaggtgacaacgaccgctttccctttcaggtcagcgaagtctttgatctcaccgcctttcttcgtcagcaggcgggtgcccacaacaaagatggtgtcggagaaggcagcctgcttctgacgctcgaggttgttggtggtggagccacactcgaagtcaaaggtgccgttttgcagcagcggaatacggttctgtgaagtgatggggatcagcttcacctgcaggtcaggtttgttcagctttttcttcacagcttcaacgatggcgttggagtaatcctgtgaatagcccacgactttttgcgtgttgtcgtagtaagagaacgggacagaagattcacggtggccgaccacgataacgccgtttttggcaatcttgtcgagagtgctgcctgctgccggagcgtcttcagcgtgaaccacgcctgcggacatccccataaccagcattgctgtggccagtttacgtaattgcatacccaactccttttttatcagcgccagcgacgcattgatacccattgtgatgttgttatatctcgcgcaatgcgagtgcagtgttatgcaagcttgttaacatttagtctggcttaatgtaaagattttgctgcgttattgtttatttttgcgaagcacgccgcaccattcagaggcaaatatctcccgttgcaccgtttcggtgctaccgatgatctacgctggtgcgacaaagttgcacagtaagccaaactgcgttcacctgaataaacaaagcaataggcgtgccagaattgaagtctggagagaattgccgagtggcgctaacgcttacccgacctacaaaagcgaaacagtaggccgggtaagcgatagcgccacccggcaggaagaggagggattatcgacgacgctggcgcaggctcatcagcaccgcgccaaagccgaacagcgcggtcaggatccacagcggccagttgccggtgcgggcgtacggcgtcagcccggtggtaggcgtgacgctggtggtcagcacttctcgggtgaactgtgggatcatggcctggatttcaccctgcggaccaatcacggcggtgatgccgttgttggtgctgcgcagcaggggacgtgccagctccagggagcgcatgcgtgccatctggaagtgctgccacgggccgattgatttaccaaaccaggcatcgttagagatggtcagcagatagtccgtatccgggcggaagttgtcgcgcacctgctcgccgagaatgatttcgtagcagatggccgccgtcagggctgcgccgtgcgcgtgcagctgaggctgaacgtacggtccgcggctgaaggaggacatcggcagatcgaagaacggtgccagcgggcgaagaattgactccagcggcacaaattcaccaaacggcaccaggtggttcttgttgtaccgatcggtggagtggtagctgtattcgctgtctttgccgagcgtaatgatggtgttgtaggtgtcgtagcggttctgctgattcagacgcgcatcgacaatgccggtgatcagcgtactgccacgcgagagcagcaggtcgttcatcatgttgaggaacggctgctggttgatctccagatcgggaatagcagactccggccagataatcagctgcgatttacccatcacctcttcggtggcgttggcgtagatcttcagcgtattcagcagctctttctcgtcccacttcatcgactgcgggatattcccctgcaccatggagacctgcatggcgcgcgcgggctccggcgtgaaccactggatatagcgcagcgggaagggcagggcgaacagcaccagcgccacagccagcggtttccagcatcgtgaaaccagcgctaataccagcaggccgctaacgaccatcagcaggaagttaatggcctcaacgcccatgaccggcgccaggcctttcagcgggccgtcaatctgactgtagccgaactgcagccacgggaagccggtcagcacccagccgcgcaggaattcggtgatctgccagaccaccggcgcggcaatggcgacgcgcagccaggtggttttgggccacaggcgagaaaggatgccggcgaacagaccggtatagagcgagagatacgcggcgagcagtaccaccaggaagacgtttaccgggcccggcataccgccaaactgggcgatgctgacgtagacccagttaatacctgagccaaacagccccagtccccagaagtagccgatagcggcagcctgtaccggacgacgattcagggtcaaaccctgaagccccatcagggagagaatggccgcaggccagatatcgtaaggagaaaaagccagcgtaccgctggctccgagtaacagcgccagcagcaaacggacgcgctggcgttcaagcaatggggcaaatgccatttacattaatcttccagttttggcaccggtgagtcgtccggcgttctgacgtgaacctgtataatacgtcggctgtcggccatggctactttgaactggtaaccgtcgatgtcaacggtctctccgcgcgccgggaggtggccaaaggcctgcatcaccagcccgccaatggtatcgacctcttcatcgctgaagtgggtcccgaaggcgtcgttgaagtcctcaatggaggccagcgcccgtacggtccaggtgtggcggctgagctgacggaagtcgatatcctcttcttcgtcatactcatcttcgatttcgcccacgatcagctcaaggatatcctcgatcgtgaccagaccggagacgccaccaaattcatcaataacaatcgccatgtggtaacgctgagagcgaaactctttcagcatccgatccacacgtttactttccggcacaaccacggcctggcgtaacactttttccatgctgaaggcttcggcatcgctgcgcataaacggcagcagatctttcgccatcaaaatcccttcgatgtgatctttgtcttcgctgatgaccgggaaacgcgagtgggcggattcgatgatgacatcgagacactcgtccagcgtctggttacgcttcagggtgatcatctgcgagcgggggatcatgatatcgcgaacgcgctggtcggcgatgtccataaccccttcgagcatttcgcgcgtatcttcgtcgataaggtcgttttgcccggaatcacgaatcagctccagcagttcatcacggtttttcggttcgccgtggaaaagctggttcagaatgagggagaaaaatccctttttactggttgtcgtgtcgctactgtgtgaattgtcgtcgctcatggcgtttgttaagggttctcttgttagttcaatgtttaccgccacgcgatgtcctttcgtggcggcaggggagtcagtccggtgactgactattctttctcggcaatgtacggatcctcatagcccagagcaagcattatctctgtctcgagggactccatctcttccgcttcgtcgtcttcaatatgatcgtagccgagcagatgcaggctgccgtgtaccaccatgtgcgcccagtgggcttcaagaggtttctgctgctctttggcttcctgttcaaccacctggcggcagatgatcagatcgcccaacagcggcatctcgatgcccggcggggcttcgaacgggaaagagagcacgttggtcggcttatctttcccgcgataggtcaggttaagctcatggctttctgcttcatccaccaggcgaatcgttacttctgattcttcctgaaactgggggataacggcatccagccatttctgaaactgtgcctcatctggcatgccggaattgtcttcacaggccagctgtaaatcgaggatcacctgactcatttctgttcttgctcctgcgcttcgcgcttacgttctgcggccacttcggccttacgcttctgatctgcctcttcccaggcttcataagcgttaacgatacgcgcgaccaccgggtggcgtaccacgtcttcactgtggaagaagttaaagctgatttcatcgacctcggccagcacttcgatggcgtggcgcaggcccgatttggtgctgcgcggcagatcgatctgcgtgacgtcgccggtaatcaccgctttcgagttaaagccaatacgcgtcaggaacattttcatctgttcgatggtggtgttctggctctcatcgagaatgatgaacgcatcgttcagcgtacggccgcgcatgtaggcgagcggggccacttcgatcacgttacgctcaatgagcttctcgaccttctcaaagcccagcatttcgaacagcgcatcgtataaaggacggagatacgggtcgaccttctggctcagatcgccaggcaggaagcccagtttttcaccggcttcaacggcagggcgggtcagcaggatacgccggatttcctgacgctccagcgcatcgaccgccgcggcaacggccagataggttttacccgtacccgccggccccacgccgaaggtgatgtcgtggtcgagaatattggcgatatactgcgcctggtttggcgtacgcggcttaatgacgccacgcttggtcttaatgttgattgccttgccataatccggcacgctctccgcgctctgctcaagcacgcgcgcctctttaatggcgaggtgaatctgctccggttcgatatcctgaatttcgccgcgcatgggggaggtgtcgacatacaggctacgcagaatgtccgcagcggcgttgacgcagatagggcgtccggtgagtttgaaatgattatcgcgacgattgatttcgatacccagacgtcgctccagttgtttgatgttgtcatcaaacggcccgcacaggctcagcaggcgagcgttgtctgctggctcaaggctaatttcacgcgtatctatgttcaaactgttcctctttgattgattaactgacccgctgccacacggcgcaataaaacggtcattaccgaaattattcacgccacagaataaaggcgcaagcgttgcggaagatattgggggcgatgagaggaaatacaaggcctgccaaagcggcaggcctgaaggattatggctggtaaatcccaacgccagaatcgttttctttgcgggtacgcgagatcacggattccggtgactctgcgatacgcaggcccatttcgtcttcggtgcggaccactttcgcgcgcagcgagttggtcagcacttcgacaatctcgacgtccacaaacttaccgatcatatccggggtgccttcaaagttcaccacgcggttgttctcggtacggccagagagctccataatgctcttgcgggaggtgccttccaccagaatacgctgaacggtgccgagcatgcggcggctccaggcgttagcctgctggttgatgcgctcctgcagaatatacagacgctgctttttctcttcttccggcacgtcgtcaaccatatcggccgccggtgttccaggacgcgcggagaagatgaagctgtagctgacgtcaaagttcacttcgccgatgagcttcatggtgcgctcgaagtcttctgcggtttcgccagggaagccgacgataaagtcggagctaatctggatatccggacgtgcttcacgcagcttgcggatggtggatttgtactccagcaccgtatggggacggcccatcaggttcagcacgcggtcagagccacactgaatcggcaggtgcaggaagctcaccagctctggcgtatcgcgataaacgtcaatgatgtcatcggtaaattccatcggatggctggtggtaaagcgaatgcggtcgatgccgtcaatcgcggccaccagacgcagcagctcagcaaagctgccggtcgtgccgtcgtagttctcaccgcgccaggcgttaacattctggcccagcaggttcacttcgcgcacaccctgcgcggcaagctgcgcgatttcaaacagaatgtcatctgccgggcggctgacctcttcaccacgggtgtacggcaccacgcagtacgtgcagtatttgttgcagccttccatgatggagacgaaggcggtcgggccatcggcacgcggctccggcagacggtcaaatttttcgatttccgggaagctgacgtcaacgaccgggctacggttgccacgaacctgattgatcatctcaggcagacggtgcagggtctgagggccaaagacgatgtccacatacggagctctctggcggatcagcttgccttcctgcgacgcgacgcagccgcccacgccgatgatcaggtccggattttttcgtttgagaagtttccagcggcctaacacatgaaagactttttcctgcgctttttcacgaattgaacaggtgttcagcagcagcacatcggcttctttcgcattttcagtcagctggtatccgtgggtggtatccagcagatcggccatcttggatgaatcgtattcgttcatctgacagccccaggtttttatatggagttttttagtcatcgacttgctcagctcaggattgcaagccgcgtattgtaatgctttggtggggttgtgaccagtatgaaggttatgtgtctcaggaccgcaaaaatccggtaaacttaagggattctccaataaggaaaattgaccatgacactccaacacaccgaagttgccgttgtcggcggcggtatggtcggcggcgcgctggcgctggggctggcacagcagggatttgaggtaacggtaatcgaacaggcggctccgccagcctacgatcccgccagcaaaccggacgtgcgcatttctgcgatcagcgcggcatccgtcgatctgctgcgcgggctgggcgtctgggaggcagtgcaggcgatgcgcgcgcacccttacagccgcctcgaaacctgggagtgggaaaatgcccacgtcgcgtttgatgccgctgagctaaagctgccgcgcctggggtatatggtggaaaacaacgtgctccagcgggcgctctggcaggcgctggaggcgcatccgaaggtgacgctgcgcgtgcctgcgtcgcttaaggcgctgcatcctcacgagggtggctatctactgacgctcgacaacggcaatgagctggccgtgaagctggtcatcggggcggacggcgctaactcgcaggtcagacagatggcggggatcggggttcatgcctggcagtatgaacagtcctgtatgctgattaccgccgagtgcgagaatgcgccgggcgaaagcacctggcagcactttacgccgaacggcccgcatgcctttttaccgctgtttgataattgggcgtcgctggtgtggtacgacaaaccggcgcgcattcgtcagctgcaggggatgaacatggaacagctgcagcgcgagatcctgctgcacttcccgagccgtctggggcacgtcacgccggtcgccgccggggcgttcccgctcacgcgccgtcatgcgttgcagtatgcccgcgaaggcttagcgctggtgggggatgcggcacacaccattcatccgctggccgggcagggcgtgaacctggggtatcgcgatgtcgatgccttactggatgtgctgggcagcgcccgcggacacgcggaaaactgggccagccatcaggtgctgaagcgttatcagacgcggcgtatggcggataacttcctcatgcagtcgggaatggatctgttctatgccgggtttagcaatgacgtagccccggtgcgtattctgcgtaacataggtctgatggcagcggaacgcgccggtggcctgaagcgtcaggcccttaagtacgctctcggcctctaaacttttttccctctccccgtgggagagggccagggttagggcatcaggccgcacaattctgtacaaaaacaaaaaagcccgcagagcgggcttttttgttttaagtggctggggtgcagggattcgaaccccggaatgctggtatcagaaaccagagccttaccgcttggcgacaccccaattgcgttaaacaagctgcttaacgactttgtaaattggctggggtacgaggattcgaacctcggaatgccggaatcagaatccggtgccttaccgcttggcgataccccaacaattttttctcattaccgaaatcgatcgataatctcaatttggtggctacgacgggattcgaacctgtgaccccatcattatgagtgatgtgctctaaccaactgagctacgtagccagtactacagtcttcgatggctggggtacctggattcgaaccagggaatgccggtatcaaaaaccggtgccttaccgcttggcgataccccaataccgcggagaaccgcaaaatcgaagaaatatggctggggtacctggattcgaaccagggaatgccggtatcaaaaaccggtgccttaccgcttggcgataccccatccgtgcaacgcttacccgggaatggtgcgggaggcgagacttgaactcgcacaccttgcggcgccagaacctaaatctggtgcgtctaccaatttcgccactcccgcaaaaaaagatggtggctacgacgggattcgaacctgtgaccccatcattatgagtgatgtgctctaaccaactgagctacgtagccatctttttttcgcgttaccttatcggcgttgcggggcgcattatgcgtatagacccttgcagcgtcaacacctttttcaacgaaaatagccggaatgtgactgtttggttaggttgcgaacagcgtgaccgaatattcggcaattattggttattaatcggttttagctgtgcaaaagcggggcaaaaaaaatcaggccccgcagggcctgagatgaaatacgtgattatttgtaggctgactggtgaacgcctaccgcacgtcctgacggatcgttcatggatttgaacgattcatcccattcaatcgctttggcagacgagcaggcgacggatggaccacccggcacacactctgcagcgctcggtaccgggaacagttcttcaaaaatttcacggtagaggtacgcttctttcgagcccggcgtgttgtacgggaagcggaagcttgcggtttccagctgttggtcagaaacctgtttcgccgccacctctttcagggtgtcgatccagctgtagcctacgccatcggagaactgctctttctgacgccatgctacgctcgccggcaggtaggattcaaaacattcacgcaggatatgtttttccattttaccgttgccgcacattttatcctgcgggttgatgcgcatcgccacgtcgaggaatttcttatccaggaacggtacacgcgcttcgacaccccatgccgacatcgctttgttggcacgcgcgcagtcaaacatatgcagcgcctggagtttacgcacggtctcttcgtgcagctctttggcatttggcgctttgtggaagtacaggtagccgccaaacacttcgtcagaaccttcaccggagagcaccattttgatgcccatcgccttgatcttacgcgacatcaggtacatcggcgtggaggcgcgaattgtcgtaacgtcataggtttcaatgtgatagatcacatcgcggatcgcatccaggccttcctgcacggtgaagtgaatttcatggtgcacggtgccgaggtggtttgccacttcctgcgcggctttcagatccggcgcgccttccaggcccacggcaaaggagtgcagctgtggccaccaggcttctgagcgctcctgatcttccacgcgacgagccgcaaatttcttggtgatcgcggagatcacggaggagtccagaccgccggagagcagcacgccgtaaggtacgtctgacatcaggtggcttttcacggaatcttccagcgcctgacgcagctcagctttgtccgtcacgttgtcttttaccgcgtcgtagtcgaaccagtcgcgctggtagtacggacggatctcgccgtctttgctccacaggtagctgcctgccgggaactctttgatggtgcggcagaccggcaccagggctttcatttcagacgcaacgtagaagttgccgtgttcatcgtggcccatgtacagcgggataataccgatgtggtcgcggccaatcaggtaagcgtctttttcgctgtcgtacagggcaaaggcaaacataccctgcaggtcgtccaggaactcggggcctttctcctgatacagcgccaggatcacttcacagtcggacccggtctggaacgcgtagcggtcgccgtactcggcgcgcagcgcctggtggttatagatctcaccattgacagccagcgcgtgcgtttttttctcgttatacagcggctgtgcaccggcgttgacgtcaacaatagacagacgttcgtgagccagaattgctttgtcactggcgtaaacgccggaccagtccgggccgcgatggcgcatcaggcgggacagttcgagtgcctttttacgcagttcgcccgcgtcagttttaatatccagtacgccaaaaattgaacacataaccttctccgttaaccctgttgctttgtaatgttgcttgcttatgaaaatgccgcaaaggggcagggcgcgcaagcgttttacgggcgaaaacggaaatagtgcaatggtggttgcggatcggtgaaaaacgcgtatgtcatgaccacttttattgaggattatgcaatgaaagtgctttttcgttagatgtggtcgtgttttgcaggtgagaaaataaaaaaccacgccctgaggcgtggttcggtatcagatgatgtcaatttcatcgacggagggataaatccagcttgggcggaacggcattgagtcaatgtcatcaagctgagagaccccagagagcaccagaatcgtctccaggcctgcctggaaaccggccagaatatcggtgcgcaggttgtcgccgacaatcacggtctcttcagagtgggcctgcatcttgttgagcgcggcccgaatgatccacgggctgggcttgccgacatagaacggcttgcgcccggagatcttctcgataccggcacacagcgcgccgcaggccggataaaaaccgcgaccgtgggtatccgggttggtcgcaataaagcgcgcgccgttagccacaaagaaggatgccttatgcatcatctcccagttgtaggagcgcgtttcacccacaatcacaaagtccgggttgacgtcggtgatggtaaagcccgctttatacagctcatggatcagcgcgccttcaccgaccacataggctttttttccttcctgacgcttcagaaaatccgccgtggccatcgccgaggtataaaacacgctgtccgggacgtcgacccccgccgtggcaaagcggtttgccagatcctgaccggtctgagaagggtagttcgtgagaagaaccagaggcattcctttgtcgatgatgcggtgaagaaactccgcagcacccggcacggcaacgttgtcgtgcatcagcacgccgtcgatatcacaaattacattcttaatggtcatggacagtccgacattaaaaaaaagaaggcgttactataaggtccgatcaactttccagcaaatgctgcagcagaattccgttgagcatggcgcgtttgaccagcgcgaacgcgccaatcgccgaacgatggtcaagctttgaacgaaccaccggaagattctggcggaatgctttcagcgcctgggtgttaatacagccttcaatcgcggggagcagcaccttttccgcctccacaatttcaccggcgatcaccactttttgtgggttaaacaggttaatggcgatggcgatggttttccccagatggcgtcccacctgctcgatcacttcacaggccagcgcgtcgcctttattagcagctttgcagatggtgcctatcttgcagtcatccagcgtcacgcggctttggtaaccctgttcaagcagatggcgaacgcgctgctcgatggcggtgttggcggcaatggtttcaaggcagccaaagttgccgcagtggcagcgctccccgagcggttcaacctgaatgtggccgatctcaccgacgttaccgttgcgaccaataaaaattcggccgttagagataatgcctgcgcccgtaccgcggtgaacgcgcaccagaatagagtcttcacagtcctggctcgcaccaaagtagtgctctgccagcgccagagagcgaatgtcatggcccacaaagcaggtcactttaaagcgcttttccagcgcgtcgaccagcccccagttttcaacctgaatgtgcggcatatagcggatcacgccgctttccgggtcgaccagaccgggcagaatcaccgagatggcgatgagttcgcggatcttgcgctgacagctttcaataaactgcgcgatggtattcagcagcgcatgctccagcgtctcctgggtgcgttccggaaggggatagtgctcttccgcaatggctttactgctcagatcgtacagcgtgagcgtggtgtcatgacggcccagacggacgccaattgcctgaaaattgcgggtttcggtaataatggagatagcgcggcggcccccggtggaggcctgctgatcgacttctttgatcaaaccgcgctcaatgagctggcgggtaatttttgtcacgctggcgggagcaagctggctttgttcggctatctgaatacgtgagattggcccgtgttggtcaatcaggcgatataccgccgcgctgttaagctgtttaacgagatcgacattaccgatttgagcttgtccgccaggtgtcatacttttacttactcagtgacgacctcgttaccattaacgatggtcttaataattttataatcgtgtgtgaatgccgtcaggtttgcaaccatacctgatgcaattccgccaagctgtttatccacgccgatagcgcgcgcaggataaagggtggccatgcgcaggacttcatcaagcgcaatcccgcaatgctcaaccaagttacgcaccccttcaatcatggtcaaagaggaaccgctcagcgtaccgttttcatccacacacagtccattgcggtagtatattgttttaccggcaaaaatgaactgctcaatatttgcacctgccggtgcggtagcgtccgttaccaggcagagcttgtcacctttcagccgcttggcgttgcgaatgttggtgtaatcaacgtgtaagccgtccgcgataatgccgcagtaaacgtctggctcatccagaatcgcgccaaccagacccggttcacgacctgtgatgtatggcatggcgttatacaggtgcgtcgcaaaggtaatgcccgcacggaaaccggctttcgcttctttcagcgtggcatttgagtggcccgctgaaaccacaattccggcggcggccagcttgctgatgacgtccgtgccggtcatttccggtgccagcgtcaccttggtgatcacatcggcgttggcacacatgtagtcaaccagctccgcatcaggtttacgcacgtagtccgggttatgcgttcctttcttgaccatgttcagccatggcccttccaggtgcagaccgagcgcctgattcggatgtttggccaggtattcgcgcatcacgcggataccctgcttcatcaggtcatcactgctggtgatgagcgtcggcagatagctggtgcagcccgatttctcgttggctttctgcatgatctccagcgtttcgaccgttaccgcatcggcggtatcattgaattgcacaccgccgcagccgttgagctgtacgtcgatgaaaccgggggagattactgctctattgagtgagcgctgttcaatctccggcggcagttctgccagcgggcaaacacgttcaatcaggccattcgcgataacaatcgcgtggtcatccagaatttcatggccggtataaatccgaccgtgggttaaagcgtacataacgacccccggttaaaaaaagcggccgcctcttgataaagaggcggttattcaattacagacctttgatgttctcggcttctaactcgttgaagtatttcagcgttttaaccttcagctccatcgtggacggttcgtcgcagacgatgactgatttaggatgcagctgcagacagctgatggtccacatatggttaacgttgccttcaacagcagcctggagcgcctgcgctttcacgccgcccagcaccagaatcatcacttcttcagcatccagcagggtgcctacgcctacggtcagggcgtattttggaacctggttcacgtcaccgtcaaagaagcgggagtttgccacgcgcgtgtcatgggtcagcgttttaatacgggtacgggaagccagagaggacgccggttcgttaaacgcgatatgaccatcattacctacaccacccatgaacaggtggattttaccgtaggaacggattttttcttcatattgacggcattctgcgtcaatatccggcgcgtttccattcagcaggttaatattttcagctgggatatcaacgtgatcaaagaaattgcggtgcataaagctatggtagctttccgggtggtctttcggtaagccaacatattcatccatattgaaggtcacaacatgtttgaagctaacctggcctgctttatgcatctcaaccagcgccttgtaagcggtcagcggtgtgccgccggttggaaggcccagaacgaaaggacgatcggcggtcggtttaaacgcgttaatgcggtttacgatatggcgagcggcccatttaccaacttgttctgcagttgccaggggaatcagtctcattgttcacctcaaagtttaagtagaagagtgggcggatggcttcggaacctgatactaaagcgtaacctggaaactttcaggccggatcaatccgtcttgattttttgaatgataaaataagttttcactgttagccagtgtaagggagggctgaatacgatatttggtgacaaaaatcacaaaaaataggtgtttaatttgcgatacgaattaatttttcacacactcagactgccagtgaattatcaacggtatctatcgttcgtgacacaataaaaacatagtttatgcgcgagcctgaaaaagggtctcgtagggggaataggatgaatattttaggttttttccagcgcctcggtagggctttgcagctccctatcgccgtgctaccggttgcagcgctgctgctgcgattcgggcaacccgatcttcttaacgtaccgtttattgctcaggctggcggtgccatttttgacaacctggcgctgattttcgccatcggtgttgcctctagctggtcaaaagacagcgcgggtgccgcagcgctggcaggggcagtcggttatttcatcctgacgaaagcgatggtaaccattaacccagaaatcaacatgggtgtgctggcaggtatcattaccggtctggtgggtggtgctgtgtacaaccgctgggcaaacattaagctgccagacttcctgagtttctttggcggcaaacgtttcgtgccgatcgcgacaggtttcttctgtctggttctggccgctatctttggctacgtctggccaccggtacagcatgcgatccatgcgggtggtgagtggattgtttcagcgggtgcacttggctcaggtatctttggttttatcaaccgtctgctgatcccaaccggtctgcatcaggtgctgaacactatcgcatggttccagattggtgagttcaccaatgctgcgggcaccgtattccatggcgacatcaaccgcttctacgcgggtgacggcaccgcaggcatgttcatgtctggcttcttcccaatcatgatgtttggtctgccgggcgctgcgctggcaatgtacctggctgcgccaaaagcgcgtcgcccaatggttggcggcatgctgctgtccgttgcgattaccgcgttcctgaccggtgtaaccgagccgctggaattcctgttcatgttcctggcgccggtgctgtacctcatgcatgcggtcctgaccggtatcagcctgtttgtggcgaccctgctgggcatccatgctggcttctccttctctgcaggcgcgatcgactacgtgttgatgtacaacctgccggcggcaagcaagaacgtctggatgctggtggtaatgggtctggtcttcttcgtcatctacttcgtgctgttcactgcggttattcgtatgtttaacctcaaaacgccgggccgcgaagacaccaaagacgaagtggtcaccagcgaagccaacagcaacaccgaagagggtctgacccagctggcgaccagctatatcgctgccgttggggggactgacaacctgaaagccattgatgcctgtatcacccgtctgcgtctgacggtgggtgactctgcacgcgtcagcgacgcaatgtgtaaacgccttggcgcatcgggcgtggttaaactgaacaaacaaactatccaggttatcgtgggtgccaaagcggaatccatcggtgacgaaatgaagaaagtggttgcccgcggtccggtcgcggcagcatcaaccgacagcgcgcctgcgtcgacggctgcgccagttgcgaagccgcaggccgtgcctaacgccgtgacggtggccgcgctggtctctccggtaacgggtgatgtcgttgaccttgagcaggtacctgatgaagcgttcgccagcaaagcggtcggtgacggtgtggcggtgaaaccaacggataaaaccgtggtgtctcctgctgccggtaccatcgtgaaaatcttcaacaccaaccacgcgttctgcctcgaaaccgaaaagggcgcggagatcgttgtccacatgggtatcgataccgttgcgctgaatggtcagggctttactcgcctggtggaagagggcgctgaagtggtggccgggcagccgattctggaaatggatctggacttcctgaatgccaacgcgcgttccatgattagcccggtggtttgcagcaacattgacgacttcagcggtctggtcatccaggcgaaaggtcaggttgttgcgggtcaaaccccgctgtatgagattaaaggcaagtaatcgctcctgagtagagtcatgccttaagcggcgggggatatcctccgccgctttttttttgcagcaaatgcccccattattttcatctgatacgtattttccgtaactaagggttgtcactacgtccggcttataagatcatatgccgttatacgttgtttacgctttgaggaatccacgatgagtgaggcagaagcccgcccgagtaactttattcgtcagatcatcgatgaagatctggccagtggtaagcacaccacaattcatacccgtttcccgccggagccgaatggctacctgcatatcgggcatgcgaagtccatctgcctgaactttggcattgcgcaagactaccaaggacagtgcaacctgcgtttcgatgacaccaacccagtaaaagaagacatcgaatacgttgagtccatcaaaaatgacgtgcaatggctgggcttcaactggtctggcgatatctgctactcctctgactattttgatcagctgtatgcctacgcggtagagctcatcaacaaaggtctggcgtatgtagacgaactgtctgcagatgagatccgtgagtaccgcggtacgctgaccgcaccgggtaaaaacagcccgttccgcgatcgcagcgtggaagagaacctggcgctgtttgaaaaaatgcgtgccggtggcttcgaagagggcaaagcgtgcctgcgtgccaaaatcgatatggcgtctccgttcatcgtgatgcgcgatccggtgctgtaccgcatcaagttcgcagaacaccaccagaccggcaacaagtggtgcatctacccgatgtacgacttcacccactgcatcagcgatgcgctggaaggcatcacccactcgctgtgtacgctggagttccaggacaaccgtcgtctgtacgactgggtgctggataacatcaccattccagtgcatccgcgtcagtacgagttctctcgtctgaatctggaatacaccgtgatgtccaagcgtaagctgaacctgctggtcaccgacaagcacgttgagggctgggacgacccgcgtatgccaaccatctcgggtctgcgccgccgtggctacaccgctgcgtcaatccgtgagttctgcaagcgtatcggcgtgaccaagcaggacaacaccattgagatggcgtctctggaatcctgcattcgtgaagacctcaatgaaaatgccccgcgcgcgatggccgttatcgacccggtgaagctggttatcgaaaactatccgcagggcgagagcgagctggtctccatgcctaaccatccgaacaaaccggaaatgggaagccgcgacgtgccgttcagcggcgagatctggattgaccgcgctgacttccgcgaagaagccaacaagcagtacaagcgtctggtgctgggtaaagaagtgcgtctgcgtaatgcttacgtcatcaaagccgagcgcgtagaaaaagatgcggaagggaatatcaccaccatcttctgttcttatgacgctgaaacgctgagcaaagatcctgctgacggccgtaaagtgaagggcgttatccactgggtgagcgcatcccacgcgctgccggtagaaattcgtctgtacgatcgcctgttcagcgtgcctaacccaggtgcggcggaagacttcctggcgaccattaacccggaatctttggtgatcaagcagggttatgcggagccttctctgaaagcggctgaagcaggcaaagcgttccagttcgaacgtgaaggttacttctgcctggacagccgtcacagcacggcggaaaaaccggtatttaaccgtaccgtgggtctgcgtgatacctggacgaagatcggcgaataatattgctgctctggtcaatgagaaacaaacgccgcattatgcggcgtttttttatttaacgatcagagtattaagccaggggttaaaggggcgtcatgaaaataacaggtcaatgaggtgctacttattttttaaaaaaaagtttgtgccattacgaaattcaaaagggttataaaaaaggaaaccgatcccacgcctggatactgaaatagctgagaatttcccgtcattcctcgccttcctgtaaatgttacaaagcactaccaattatgtgcacttcgtcataatcctgacttttgcccgctgaaaagcattgataattcgcgtcgcgaaaaataacctaaagacggtagttaattcgagggtatttaacactacccctgaccatttggtcttttttatttacgccgtttcaggcgttttaattcgtcaaagaggaataatctatgcgtacgttcagtggcaaacgtagtgcgctggcgctggctattgccggtgtgacagcaatgtcgggcctggtgattgcgccagaggcaaaagcagcgggtttcatcgaagattctaccctcacgggcggtatttattactggcagcgtgagcgtgaccgtaaagacgtcactgaagataaatacaaaaccaacctctcgcactccacctggaacgccaacctggatttccagtcaggctacgccgcggatatgttcggtctggatatcgccgcgttcaccgcgatcgaaatggcggaaaacggcgacagcggccacccgaacgaaatcgccttctcctccagcaacaaagcctatgatgaagactggtccggggataagagcggtatcagcctctacaaagccgcagcgaaatttaaatacggcccggtctgggcgcgtgggggctatattcagccaaccggccagacgctgttagccccacactggagctttatgccgggtacctatcagggtgcagaagccggggctaactttgactacggtgacgcaggtgcgctgagcttctcctatatgtggaccaacgagtacaaagcaccgtggcacattgaaatggacaagttctaccagaacgataagaaaaccaaagtcgattacctccactcgctgggtgcgaaatacgacttcaaaaacgatctggttctcgaagcggcattcggccaggcgcaagggtatatcgatcaatactttgccaaggccagctataagtttgatattgcgggtagcccgctgagtaccagctaccagttctacggtacgcgcgacaaagtcagtaacggtggcgtcaatgatatctacgacggcaccgcgtggctgcaggcgttaaccttcggctacaaggtcggtcaggttgatttgcgtctggaaggcacatgggtgaaagcggaagggcagcagggctacttcctgcagcgtatgaccccgacctatgcttcctccaacggtcgtcttgatatctggtgggataaccgctccgatttcaacgccgacggtgagaaggcggtcttcttcggcgcgatgtatgacctgaaaaactggaacctgccgggctgggcggtgggcgcttcttacgcttacgcctgggatgcaaaacctgccgacatggcaacaccggatgcttactacgatccaaactatcgcctgaaagagtcttcctacagcctggatgctatctataccctgcaggatggccgcgcgaaaggcacgatgttcaaactgcacttcacccagtacgacaaccactccgatatcccgagctacgcgggcggttacggcaacatcttccaggatgaacgtgacgtgaaattcatggttatcgcaccgttcaccatcttctgatgaatcgtccggcgggttagatcccgccggaccggagactgcaaatgatgaaaaaaatcgtaatcgtcgcgctgttggcatcggggctggtggcgtgtgcccagactcaggcaccgaaagaggactcccgtctcaaggaggcctacagcgcctgcattaatacagcggaaggatcgccggagaaaattgaagcctgccagagcgtgctgaacgtgctgaagaaagagaaagcgcacgagcagttcgcgacgcaggagaatgtccgcgtgatggattaccaggcctgtatccaggcacgtaaaaccggtaacgatcaggaagtggcgaagcgttgcgataagatctggaacgagatacgcaataataataaataagttgctttacgcccggtggcactgtgccaccgggcttttttctggcaaaaaaaagccaaccttacggctggctcagagtatgaacactcacttattttgcgtcatgcgcatgttcattttcgcggcaatcgccttcagcgcagtgaccataaaggtacaggctgtggttggtcagacggatgccgtgacgcgcggcgatttcacgctggcgcgcttcgatagagtcatcgctaaattcaatgaccttgccacagtcgaggcagatcaggtgatcgtggtgctgctgctgggtcagttcgaagacagatttaccaccttcgaaattatgacgggtgacaatgcccgcgtcatcaaactggttcagcacgcgatagacggtagccagcccaatctcttcacccatgtcgataagacgtttataaaggtcttccgcactgacatggtgattgtctggaccctgaagcacttcgaggatttttaaccgaggaagcgtaactttcaggccagccttctttaatgcggtattgttgtcagtcatgcggaatctgtcctgttgctaaacgattcacttctgtaggaagtgacagaaaatgcacccgggataatgcgtctcattatagaactgccatggctaaatgaaaactgcaagtctcaggcaaaatatgcttataaaaatggggtatcaccaacaaacttgctcggtggaaaaccacattttatcagagagacattgtacaggtctgggcgaaaaagttaaaagattgtagcaattaatttaatcggtttgacctggtgcggggcgcaaccgccgttgcgccgcgataaaaatcaggcgttgagaatatcgtccaggtgcagttcttcacggatctgcttaacccatttctctacgcgctctgcagtcagttctggctgacggtcttcgtcgatggccagacccacgaaatgatcgtcatcggccaggcctttggacgcttcgaagtggtaaccggcggttggccagtggccgacgattacagcgccattcggctcaatgatgtcgcggatggtacccagcgcgtcacagaagtactcggcgtagtcttcctggtcgccacagccaaacagggcaaccagcttaccgttgaagtccacttcttccagcgtcgggaagaaatcatcccagtcgcactgggcttcgccgtagtaccaggtcggaatacccagcagcagaatgtcatagccttcgagatcttctttgctgctcttggcgatgtcatgcacatcagcaacgtctttaccgagctgtttctgaatgtttttcgcgatattttcggtattgccggtatcactgccaaagaaaatgccgatgattgccatgagtaaaataacctcttgaaacttaatagtatggtggcgcaattcggccacggataagggcaataatagcagaactggcaaccctgcggaaacagctatcgcgcaggactgcactctgtgctacatgaaaagggtaattaagggaattttcagacttatgcctggctgcgcagcatctcaagctgggcgatcaacatctcttcaatgagctcgctgcggctaatatttcgcgcgtcggccagctcgttaagcgcatcgaccgcgtcggcgttgagcttcagttcgacacgcttaagcccacgatttttatcgcgtttaagctgattgcgtttattgatacgcagctgttcatcgcgcgaaagcggattcgtcttcggtcgtcccgggcgacgctcattcgcgaacagatctagtgtcgtacggtccgtttgttctttggccatgattctgagacttcgggggaaacacgccgccctgctaatgcccgggcgataagcgcgccatcatacatcaccaaaaacggcgcgccaacgactggaagcccgcagccttccagtcgctctctttttaatcaatttgcagtatcagcaagatagcggcgaatggcgcgcagcacggcgtcaggtttttccgcatgaacccagtgtccggctccggcaatgacgtgggcgcgagcctgcgggaattgcgccagtatggcgtcgcggtacgcgtcggtaacgtaaggggaattaccgccgcgaataaagagggtagggtgtggccaggcggggacggtttcccaccccacgatattgttgtactggttccagagcaccggcacgttaaaacgccacttgccgtcaacaaatgacttcagcaggaactggacgacgccttcttcatcaagatgctcacgcatgacggcagccgcctgctgacgcgtcgcgacacccgcttcggtgaccgcattgatggcggcaaaaatttcgtcgtgacggcggacgtcgtaatccacgggcgcaacatcaatcaccaccaggccgttaatacgctccggggccagcgccgtaagggccatcaccgctttaccgcccattgaatgcccgatgagggtcaccttttgcaagtggttggcatccagcgtatcccgcagatcctgcgccatcgcggcgtaggtcatctcgtcggaacggccggaaagaccgtgattgcgcatatcaacctgaagaatatcgtggtcggtaaccagatcgcgcgccagcacgcccaggttatccaggctgccaaaaagcccgtgaaccagtacgatgggagaattattgttcggcgattgtgcagtttgcgctcgggtattcaatttcatggcaaagttctttttttacgtatgtcaggttagggtatcatgttgaccattctgccgcccggctgcaaggttccagtttaatctgacttttgccgccaacctggtttgacgctatccgctgttgggatttgaccttataatcccaatgacttgtattcagataagatatcgcactggattaagatgaaaacaatcgaagttgatgacgaactctatcagtatattgccagccagacgcggcatatcggggagagcgcgtccgacattttacggcgcatgcttaaaatttccgccgcttcacagcctgctaccccagtcaccaaagatgtcgtgtctcagccaagcgttgttgcacaagcaaaacctgccgtgacaccggcaaaagataaagtgcgcgcgatgcgcgagctgctgctctccgatgaatatgcggagcaaaaaaaggcggttaaccgctttatgctggtgctgtctacactttattcactggataacaaagcgtttgctgaagcgaccgagtcgctgcacggtcgtactcgcgtctacttcgcgggcgacgagcagacgctgctgcaaaatggcaatcaaaccaaacccaaacatgttcctggcaccccgtactgggtgatcaccaataccaatacgggccgcaagtgcagcatgattgaacatatcatgcagtccatgcagttcccggcggaattgattgagaaggtttgcggtacaatttaacccttgcatcagaaggacccggtaatggcaaatcacagccgtgcaggccaacctgcacaacaaagcgatttgattaacgtcgctcagctgaccgcgcagtattacgtgctgaagccggtcgtgggcaacgcagaacacgcagtgaagtttggtacatctggtcaccgcggcagcgcggctcgccacagctttaacgaaccgcacattctggccattgctcaggccattgcggaagagcgcgctaaaaatggcgttaccggtccttgctacgtggggaaagatacccatgcgctgtctgaaccggcctttatctccgtgctggaagttctgactgcgaacggcgtcgatgtgattgttcaggagaacaacggcttcaccccaacgcctgcggtgtctaacgccatcctggtacacaacaaaaagggtggcgcgctggctgacggtatcgtgatcacgccatcccacaacccgccggaagacggcggcatcaaatacaacccgcctaacggtggcccggcagacaccaacgtcaccaaagtggtggaagatcgtgcgaacgccctgctggctgacggtctgaaaggcgtgaagcgcatctctctggatgcggctatggcgtccggccacgtaaaagagcaggatctggttcagccgttcgtggaagggctggcggagatcgtcgatatggcggccatccagaaagccggcctgaagctaggcgtggatccgctgggcggctccggtattgaatactggaaacgtattgccgagcactacaagctggatctgaccatcgtgaacgatcacgtcgatcagaccttccgttttatgcacctggacaaagacggcgcgatccgcatggactgctcctccgagtgcgcgatggcgggcctgctggcgctgcgtgataaattcgatctggcgtttgcgaacgacccggattacgaccgtcacggtatcgtcactcctgccgggctgatgaacccgaaccactatctggccgttgcgatcaactacctgttccagcaccgtccgcagtggggcaaagaggtggctgtcggtaaaacgctagtgtcctccgcgatgatcgaccgcgtggtcgaggcgctgggccgcaagctggtggaagtacctgtgggcttcaaatggtttgttgacggtctgcacgacggcagctttggcttcggtggtgaagaaagcgcgggggcctctttcctgcgcttcgacggcacgccgtggtcaaccgataaagacggcatcatcatgtgcctgctggcggcggaaatcaccgcggtcaccggtaaaaacccacaggaacattacaacgacctggcagcacgctttggtgccccaagctataaccgtattcaggccagcgcaacgtctgcccagaaagctgccctgtccaaactctctccggagatggtcagtgcaagcaccctggcgggcgatccgatcaccgcgcggctgacggcggcaccgggtaacggtgcgtctattggtggtctgaaagtaatgaccgaaaacggctggttcgctgcgcgtccatccggtacggaagatgcgtataaaatctattgcgaaagcttcctcggcgctgagcatcgtcagcagattgagaaagaagcggtagagattgtcagcgaagtgctgaaaaacgcgtaagtgcggtttgtgtgccgggcggcactgcgtttgcccggcctacaacaacgatcgtaggcccggtaagcgctagcgtcaccgggctttttttcaactgtgcttattcttcaattcaaaccgtggtgacaccagaccgtacagcgtccagcccataaaggtcaccatcgcaccatacagcatcgcttcctggccggaggaatagagcgcatagaagctgtagattgcgccaatcagcgccacgatattggccgcacgcgccttgcgcggatccaccttcgcaaccttctgaataatcaccagcgccgccatcgacagaatatacggaatgatgttcgtcaccaccgccaggttgaccagcacgttgaactggctgttcagcgacgggctaatggtcatcagcgacaatccgctctggaagataacaatcgccagcatgccctgcaccggcgcatcggctttggtgacgcgggagaagatttttgggaagtaaccttcatcagccgaagatttaaatacctgtgcgatggtgaactgccagccaagcagtgaaccgcagcatgacatgaccatcagacccataatcactttcccgacttccggcgtgaacatctgcgcgaaggccagtccgaacggcgccgtggagttggccagatccatgttcggaacgatgcccgcaatgacgttcgtcgagacgatatagatcaccgccgcgcccagcgtaccgccgaggaccgcaataggcacgttcttttcagggttatcaaccacttctgcgttcgcgcaggcggattccaggcccaggaaggcccagagcgtcatggcgatagaagagccgactgcgctgaagaacggcacatggtgcgggttccaggagttggcgtacagggtcgggctgaaccagaaccagccgatgatgcacaggccgacaaccggaataatcacgccccagacggtgatgctggagagctgtccggtgatacgcgccccgccaaagttagccacggtgcagatccacagcacgccgatggtggccaggccaatctgtaccgggctaagcgtcgcgccaaacagctccgtgccgtagcccacggcggagatggcaatcgccacgttggcgatcagcagtgacaccccgtaggtatagttggccataaagttgccagacttaccaaaggcatactcggcgtagccccccatgccgcctgacttgcggctgaacatcccgcacttggcaaacgcccacgccagcgccatcgagccgacggcggtcaccagccaggagataattgaaatggttcctacttcggcaagcttggtgggcagcatgatgatgccggagcccatcatgttcaccatggtgaggatggtcagctgcaccacgcccatcttattggacttactcataatttctctcctttcagcagcgcgggctgagcggcgggttgtttgatgacgttacagcgaacctgtttgcggccctcgcactcttcgacgtacacaccctgcagctccggcgcgaagcccggcagcaggttgatgccttcttccagcgcggcgaagtagcgcagcacggagccgccccagacctcccctggaaccacgcacaatacccccggtggataagggagggcgccttcggcggcgatgcggccttccgcgtcgcgcagggagaccagttccacttctccgcgcagataggcgtagttcgcgtcctgcgggttcatcatcacgcgcgggaagtgagacttgcggaacatctctttctgcagctgtttgacattgtgacgggcgtacaggtcatgcatctcctggcagatctggcgcagggtgtaatccgcgtaacgttccggatgttgtctgcagatggaaggcagcacctcttttaatggagcatcgctctcgagcagtttttcgaaacgcaccagctgcgccaccagctgctgcagcttgcccatatcttccgcaggcgtgagcaggaacaggatcgagttgagatcgcatttctccggcacgatgccgttttcacgcaggaagttggcgaggatggtggcgggcacgccgaagccgtcatactccccggtgcgggcgttaatgcccggcgtggtcagcaggagcttgcacgggtcgataaaatactgatgctcggcgtagccttcaaaagcgtgccagttttcacccggtacgaagtggaagaagcgcagatcggtcgcaatctccgccgtgtcccagctttcccacggacggccatccaccgtctccggcacgaaggggcgcagataccggcagttctccagaatcagcttgcgcgcttcgataccgttcaccacgcagtccatccacatgttgcggccgctctggccttcatgcatacgggcgttgatgtccagtgcggcaaacagcggataaaacgggctggtggaggcgtgcatcataaaggcattattcagccgcttatgcgggacatagcgctgctgacctttgatgtggctgtctttcttgtgaatttgcgaggtctgggagaagccggcctgctgtttatgcaccgactgggtaaccaaaatccccgggtcgttttcgttcagctccagcagcagcggcgagcagtcggccatcattggaataaactgctcgtaacccacccaggccgagtcaaacaggatgtaatcacacaggtgcccaatcttatccaccacctggcgggcgttgtagatggttccatcgtaggtgcccagctggatcaccgccagacggaacggacgcgcatcgcgtgcacgaccgggtgcgacttctgccaccagctcgcgaagatagctttcttcaaaacagtgggcgtcaatgccgccgataaagccgtacgggttgcgcgcggtttccagatagaccggcgttgcgcctgcctgaaggagggcaccgtgatggttggatttgtggttattacggtcgaacagcaccaggtcgcccggggtgagcagggcgttcagcaccactttgttggatgacgaggtgccgttgagcacgaaataggtcttatcggcattaaagaccttcgccgcatgctgctgtgcgatgcacggcgcgccttcgtggatcagcagatcgcccattgccacgtcggcgttgcacagatcggcgcggaaaagcgtctcgccaaagaaatcaacgaactgattgccggcaggatggcggcggaagaactggccgccctgatgccccggacagtcaaacgcgctgttgccctgttttacatagtcgaccagggcgcggaaaaacggcgggcgcagctgggtttcatacttcagggcagccgcctccagctgtcgtccataaaagtcgttactggtgtctgaatactcaaatacgccatgaatgcgcgataaataatctgccggaatgaattcttctttatgcgtcgcgacaaaaacaggaatgtcaaatccggtggcttctatttcttccagtatgccatcggtaatatcactgaccgccagcacaatagcggcaacgtcgatataatccgaggcccggacatccaccagttcacgctgggtggtaaagcaatccggacatgcgcggctggctgcgatttttaaacttttcatctttctctctttattttaggtaataagcgtccctcgatttcttgtaaaaaagaaatcgataattttccggaaaaaaagcaaagggtggctgctgattaaaatcagtacattgcttttttgatgattgaaattcagtccgcccggtgcggaagggtctgaatcaaaatgaatgagcgcacgcgttcacaggcaatggcctgtaaaataagatgtttcagggtaacctgtaagcgaatgcgccagaagtcgaaggactaccgggcattaaagagatgaaagtcaaagcagtttcggtgggcaaacatcatgatatgtgttgtccgccttatatggggcattaaacgattgttgttttccgtgatttattttcctttcagtaattgaaagcacggtcattttatccaggaaaacgcgattaactgtgaaggagatcaccgttaaccgatcattttagaaataaatagtcgtttttgatgaatatcgcagatcaaaattctgatttgttgatatcgggttaacagaatgtattgcaaatgttttttaatgggcataaataaccaaaaaaatatcgagtggattatttatgaaatattttctgagaggtttttattttatttaaaaataaactgaatagttattcagagcataaaccgataaccgataccggtttcagttaataaatggcgagggcgagcggggtcgacttcgagtttctgacgaaggtgccccatatatatgcgtaaatagtgactatgttccacggcgttgggcccccacacctgacttaacagctggcgctgggtgagaaccttgccgtgattgttgagcagcacggcgagcaggcgaaattcgatgggcgtgaggtgaatttcctcttcgccgcgcacaatgcgccgcgcggccaggtcaacccggatatccccaaacgtgtaggttggatcggcaggcgtggtggcgctgtggcgacgcagcgccacgcgcaggcgagcctgtagctcgccgatgccaaacggtttaatcaggtagtcatccgccccggcatccagcgcggcgattttatccgtctcttcagtacgggcggagagcacgaggatcggcatctggctccactgacggacttcacgaataaaatcgatgccgtcaccgtccgggagacccagatcgaggatcaccaggtccggcttgcgggtggcggcttcaattaacccccgctgaagcgtacctgcatcatggacgcgcagaccgtctccttccagcgcagcgcgcagaaaacggctaatggcgatctcatcttcaacaatcagaacgttgatcacaaatcctctggtaattcattaagttctggcggggtttccagaggaagtgtaacacaaaaacgcgcaccgccttccggacgattctccgcggaaatggagccgccatgcacgtcaatgatcgcctggcaaatggccagccccagccccacgcccggaatggccgactccttattgccgcgcgcgaatttctcgaaaatagccaactcctgcccggcaggaatgcccgggccggtatcccagacgttaaggcgaagcgcgccgtcgtccaccgtcgcatccacgccaatctgcgcgctggcgcccgcatatttggcggcattttcaagcaggttgatcagcacccgttcaaacagcggaccatcaacgtgaattaaggtcaggggttcgggcatgttcagcgcaatatgtcgcccgcccaggccgggttcgagcattttcagcgcgctgcccaccacctcttccagcgtgagccactcttttttgaggttaaatccgcccgactggatacgcgccatgtcgagcaggttattcaccaggcgcgtggtattcagcacgtgctggcggatctcgctggcctgaagggcatgtttagagccttccgccgccaggtccagcgtcagaatttctgactgaccaaacaggacggtgagcggggtacgcagatcgtgagacagcgccgccagcagcgagttacgaatgctttcacgctcgctcgccagccgggcctgttcctcgctggcggtgagggccagtcgttccagcgcgctggcaaccagcagcgtaaacgtctccagtaaacgctgctgttcggggatcatcagctggcgcaggttggaaggctccacgatgaccagcccctgatttttatcggcgctgcgcagaggcagaatttggtagggcacgccggggagggtgtcggtccctgcgcccgccggtaagcctttgtcaaagctccagcgcgcgatggcttcgtcccagggcgtcatgcctgtggcggacgtcagcgggcgcagcttgccgtgttcgtccgggagtaaaatcaggttgctggcatgaaacgtcgagcggataaactgctcgctggtctgcacgatatccagcggcgtgcggcccaccgccagcgatttcgacatctcatagagatggcgcgtgcgctgttcgcgatagcgggcgatgcgcgcctgatagcgcacgcccgccgtcaaattgccgatcaccagcccgacggtgagcatgacggcaaaggtgaggatgtactgcacgtccgagacggcgagcgtcccgcggggggcaataaagaacagatcgaagctgatgacgttgatcaccgtcgccaggaccgacggccagcgcccgtagaagagcgccaccaccaccacgcctaaaaggtagatcatcaccaggttggcggcatcaaacgcgatcagccactggctggcaatcacggtaatcagggcgcagagcacgacggcgacgagacagccgcgaagctgaatgcgccatttatcgctgaaggtacggctgtccggcgcgcgattgggtaagggggtaggtttgtcatccagcgccacgatcaccagatccagatccggcgcgcgacgggccagcttgtcggcaaaggattcgcggctaaaccagcggcgatgctggcgacggccgatgacgattttccccaggttatgctcgcgcgcgtagcgcagaatggctttatcttcctgcggatcggaaagggtggcggtttccgcgcccagctcctgcgccaggcgcagcgaactcaggatcgcgcggcgctggttttcgggcagcgcgtgcagctgcggcgtttcgacatacaccgcatgccagacgctgccaaatttggccgccaggcgcgcggcggtgcggacaagcttttcattgccgctgccgtggcccacgcacagcaggatggcgtcccgcgtgtgccagacgcgttcctgtccctgtaaatcgcgccaggcgcgcatctgatcgtccacacggtcggcggttcggcgcagggccagctcgcgcagggcaatcaggttgcctttacggaagaaatgttcgatggcgcgctctgcctggccggcaatataaaccttgccttcatgcaggcgctggcgtaaatcatcgggcggcaggtcgaccagcaccacctcatcggcggaatcgaagaagggatcgggcaccgtctcgcgtacctgaatgccggtcacgccgctgaccacgtcgttcaggctttccagatgctgaacgttaaccgtggtgaacacatcgataccggcttcaagtaattcttcaacgtcctgccagcgtttggggtggcgcgagcctggcgcattgctgtgcgccagctcgtccatcaggataagcgcggggcggcgggcgagggcggcatcgagatcgaattcggtgactaaccgaccgcggtggctgatgcggcggggcggctgggtagccagccccttcagcagtgatgccgtctctttacgtccatgggtttcaaccacgccgatcagaatatcgagcccctgcgcccgaagccgctgggcttccgtcagcatggcgaaggttttcccgacgcccgcgcaggcgccgaagaaaattttcagtttgccgcgatgggcctcagctgtttgttcgagcagcctgtccggatccgggcgcatgggctcgtcggtcatttagtttttccttagcgcgtccagcgccagattcagctcaacaatattaaccacgggcatgccgatgaagctgaccagcggcttttgcgtgtgctctgccaccaactggctcacctgttcgacggtcagctgacgggcagcggcgacgcgcgggatctgccatgccacggctgctggcgtcaggctgtagtccagcccgctggccgaggcggttaccagctccacgggaatgtcacggctggcctgcggattcgcggcgcgcagggctgccacgcgctcagcgacggctttgtccagctcggggttgctgcccgccaggttgctgccgccggatgccatcggattatacgggctttcggcagtggcggaagggcgtccctggaagtagcgggcatccgtaaagttctgaccaatcaggcgagagccgcggttttcaccgttttgcagtaacagcgagccgttagcctgatccttaaaccaccactggcccagcgcggtggtcaccagcgggtacagcccgccggtaatgagagacaacagtatgaacagaagtatagcggggcgtaacattgtcatttgattcaccttttaaaccaggccgaacagcgtcaacagcaggtcgataaccttgataccgacgaagggcaccaccagcccgcccaggccgtaaatccacaggttacggcgcagcatggcggccgccgtgagcggcttatagctcacgcccttcagcgccagcgggatcaggaagacaataatcagggcgttaaaaatcactgcgctcagaatggccgaggccggagagtgcaggtgcatcacgttcagggcgtttaattgcggataggtcgcagcaaacgcggccggaatgatggtgaaatacttcgccacgtcgttggcgatactgaacgtggtcagcgaaccgcgcgtcatcagcatctgcttgccgatgtgcaccacttcaatcagcttggtcgggttagagtcgaggtcgaccatgttgcccgcctcttttgcggcctgggtaccggagttcatcgccaccgccacgtcggcctgcgcgagggcaggagcatcgttggtcccgtcgccggtcatcgccaccagacggccttccgcctgatactgacgaatcagtgccagcttggcttccggtgtggcttcggaaaggaaatcatccacgcccgcttcggcagcaatcgccgcggcggtaagacggttatccccggtgatcatcaccgttttgatccccattttacgcagctgggcaaagcgctctttgatgccgcctttgacgatgtccttcagggcaatgaccccgagcacgcgcgcgccttcggccaccaccagcggcgtcgccccctgacgggccacgctttcgaccaggctgtccacttccggcgggaagtggccgttgttggcctcaatgtggcggcggatcgcgtcaaccgagcctttacggatcatgcgatcctggatgctgatgccgctcatgcgggtttgcgccgtgaagggcacgaacgtggcgtgcaggctctgcacgtcgcgctggcgcaggttaaagcgctgcttggcgaggatcacaatgctgcggccttccggggtttcatcggcaagcgatgagagctgggcggcatccgccagcgttttttcatccacgcccggggcgggtaaaaaatccgacgcctggcggttaccgagggtgatggtgccggttttatccagcagcaacacatccacgtcaccggcggcttctaccgcacgcccgctggtggcgatgacgttggcaccgagcatacggctcatgccggccacgccgatggccgacagcaggccgccgatggtggtggggatcagacaaaccagcagcgccaccagcaccgtgacggtgaccgcggtaccgccataggcagagaacggccacagcgtcgcggttgccagcaggaagacgatggtcagggccaccagcaggatggtcagggcaatctcgtttggcgttttacggcgctgtgcgccttccaccatggcgatcatccggtcgaggaaggtttcacccgggttaacgctgcactggatcaccagccagtcggagagaatgcgcgtcccgcccgtcactgaggcgaaatcgccgccggactcacggatcaccggcgcggattcgccggtaatagcgctctcatccaccgatgcgcccccttcaataacttcgccgtcgcaagggatgatgtcaccggcttccaccagcaccacatcgcctttacgcagttcatctgccggaacgtggtccatctgcgcgccgtacttcggctcacgtagcttgcgtgcgaaggcggtctttttcacccctttcaggctgttggcctgggctttactccggccttccgccagcgcttccgcaaagttggcgaacagcacggtaaaccacagccacaggctgatggcgccggtaaacatcgcatttcccggcatatggcccgttcccatggcaatcgccagggcggtggtcaggacgcttcccgcccagacgataaacatcaccgggttgtgccactgcacgcgcgggctcagctttttcaccgcatccatgagcgcctggcgaactaatgacggttcgaacagggccagttgtttacgactcatgacaatttctccgcaaaatcagcgtaaagagaggtattccgcgaccgggcctaacgcgagggcggggataaaggtcagggcgccgaccagcaacacggtgcccgtcagcaggccgataaacagcgcgccgtgggtcggtaacgttccggtggtggtcggttggatttttttgttcaccagcgatccggtaatcgccatgaccggcacaatgatcccgaagcggcccacgaacatgcagaacgccagcagacagttccagaatggagagttggcgcttaggcctgcaaaggcgctgccgttgttgttggcggcagaggagacggcatacagcacttcgctaaaaccgtgaatgccagggttaaagatgccgctgcgtccggcctcggtcatcagcgccagcgcggtgccgagcagcacgagagccggggtgaccagaattgccagcgcggttaacttcatctcgcgaacgtcgatctttttacccagatactccggggtgcggccaatcatcagaccggcaataaacaccgccagcagcacgaacagcagcatgccgtaaagaccggagcccacgccgccaaacaccacctcaccaatctgcatcagccacattgggatcatgccgcccagcgccgtaaaggaatcatgcatggcattgacggccccgcacgacgctgccgtggtgacgactgcatagaggctgctggcgagaatgccaaagcggctctctttaccttccatgttgattgcgctatctgcacccagtgagaggaagtgcggattaccctgccattcggcccacatcaccagcgcaacacagaccacgaaaataagcgacatggtccagagcagggtacgcccctgacggcgatcgttgaccacgtcgccaaaggcaaagcagagcgcggcggggatcaggaaaatcgccagcatctgcacaaaattggtcagggcggtcgggttttcgaacgggtgcgacgagttggcattgaagaagccgccaccgttcgttccgagcattttgatggcttcctgcgacgccactggccccatcggcaggagctgttttgccccttccagcgaggtataaggtgcgtaagacagcaggttttgcaggctgccctgctgtatgaagaacagcgcgatcagcagcgcaatcggcagcaggatccacagcgtaatgcgcgtcaggtctacccatgcgttacccagcgtgctcactttctggcgcgcaaacgcccgcgttagcgcgaagatcaccgcaataccgctggcggcagagaggaagttctgcacggttagcccgaccatctggctgaagtagctgagcgtggtttcaccggcataggactgccagttggtgttggtgacaaaactgaccgccgtgtttagcgcgagatgccaggacaggcccggtaactgctgcggattcaaaggcaggacaccctgcaacatcagcatggcaaaaagcgcgatgaggccaacgatattcagcagcagaatagcgatcagatagtcacgccagttcatctcccgatcgtctatacccagtacgcgccagatccctttttcaacgcttcccgtgccgggcaggggaacgttattgatgagccgtgccagccccgagcccagtggccttgccaggacgaacaacaccactaagaaactggcaataagcaaaaacgcctgagcagccatcagaatgcctccgcattaatcagggcataaaccagataacccaataacaggaacaccagcacgatgccggcaataagacctgcactcacaatccacctccgggtgacttttgttgttgtgctaacggtaggatttatggcgcaaagatttcgcaaaaatgagaagggcgggtgtaaaaaaagtataaaaatggcaaagcccacaatttaactactgataagtaaatcgttaacttttttgtaacttaattacggcgtgaatgtaaattttggctaaacggacgaaaataagtggtcggatgagtagtaaaattacaaacaaagcgatattattttagccaggtcacagattttgaattttccggatgacgtttccggccaactataggggagaaaaatatggatctttataaagagtttccggctcatatcgtgttcatgcgccgcgctttcgccgtagtggctggcgtgctggctctgccggtgatgctgttctggaaagatcgtgcacgtttttatagctatctgcaccgcgtctgggcgaaaaccagcgagaagccggtgtggatggatcaggccgagaaagcgacctgcgatttttactgatactaagacgacacccagaaaaaaacgccgtgggagcgatagcccctcgtcagggtttacaggcacataatagtcgtctttcttgccgggtgacgctgcgcttacccggcctacacagggcaaagagatcaatgcattgcatgtttcattgtaggcccttgcaagcgtagcgccgccgggcgaaatgcacagcatgcaccttgtcatcagtccgtaaggccgccttgggcggccttttttatttcatcccgtctacacttcatggcaaagtagttcaatgcatgctttttccttttacggcatgcccttacggacataatggatatttgcctggagttttatgcccacccatctggtttggtttcgcgcggacctgcgcgtacatgacaacttcgcactcgcggcagcctgccgttccgatgacgccagcgtgctggcgctgtttatcgctacgcctgaacagtggcagcagcatgatatggccccgcggcaggcggcttacctcaaatcgcatctgaacgatctgcaacactcacttgctgaaaaaggtatcccgctgatctacaaagaggtcagtgactttgccgcgcagcttaagatgttgcgggaggtatgtcagcagaacggcgtcacgcatcttttttataactaccagtacgagctgaacgaacggctgcgggatcgccaactggagaacattctgggcgaggtggtttgtgaaggatttgatgacagcgtaatgctggcaccgggcagcgtcatgaccggcggccatgaaatgtataaagtgttcacgccgtttaaaaatgcttttgttaaacgtctgaaagaggcgctgccggagtgcgtacccgcacccgcagccagaggggaagctataaccacgctgcctgaattaacgtttaactatccccaacagacattcgatgagcttctgttccccgcaaacgagaaggcagcaattgcgaagctgcgccagttttgcaaacagggcgcgggagagtacgacgcgcgcagggatttcccggcgattgaagggacaagccgcttatcggcaagcctggcgctgggcgtactctctcctcgccagtgtttacatcgtcttctggccgagcagccgcaggcgatgggcggcggggcgggttcggtgtggctgaacgaactcatctggcgtgaattctatcgccatctgatgacgtatcatcccgatctctgtaagcatcgtccgttcatcccctggaccgacaacgtaaaatggcagcacgatgaggcacgtttacaggcctggcaaaaaggggaaacgggctatccgattgttgatgctgccatgcgccagctgaatgaaaccgggtggatgcacaaccgcctgcgaatgattaccgccagctttctggtgaaggatctgcttatcgactggcgtatcggagagcgctattttatctctcagctgatcgacggcgatctcgctgcgaataacggcggctggcagtgggcggcctctaccggcaccgatgcggctccctatttcaggatttttaatccgaccactcaggggcaaaaatttgatgccaacggcgactttatccgccgctggttgcccgcgctcaggaacgttcctgcgaaagcaatccacgacccgtgggcatgggcggataaacagggcgtaaagctcgattatccccgcccgattgttgaccataaacaggcgcgcaccgccacgctggcggcgtacgaagccgcccgaaaagtttgagagcataaagatgaaaaacagtgaactggaacgcctgattaacgaaaaactcaataccgcctcctttagcgactacggcccaaatggcctgcaggtagaagggcgcgaaacggtgcagaaaattatcaccggcgtcacggcaagccaggcgctgctggacgaggctgtccgtcaggaagccgatgcggtgattgtccatcacggctacttctggaaaaacgaatcaccgattattcgcggcatgaagcgcaaccgcctgaaaacgttgctggcaaatgacatcaacctgtacggttaccacctgccgctggacgcacacccggaactgggcaacaacgttcagcttgcgcagctgttggggataaccgtaatgggcgaaatcgagccgctggtgccgtggggcgagctggcgatgccggttcccggactggagctggcctcgtggattgaagcgcgcctggggcgtcgcccgctgtggtgcggcgatacgggcgcggacctggtaaaacgcgttgcctggtgcaccgggggcgggcagggctttatcgacagcgccgcgcgcttcggtgttgatgcctttatcaccggcgaggtttccgagcagaccattcactcggcgcgtgaacaggggctgcatttctacgcggccggccatcatgccaccgagcgcggcggcattcgggccctcagcgagtggctgacggaaaataccgatctggatgtaacctttattgatatccctaacccggcctgatgagaggtgcctgagtgcagcgagcgcgttgttatcttctgggagaaacggcagtggttctggagctcgagccgccggtgacccttgccacgcaaaagcgtatctggcggctaacccagcgtctggtcgatctgccggacgtggttgaagccattccggggatgaataacatcacggtggtgctgcgtagtccgcatacgctggcgctggatgccatcgagcgtttacagcgctggtgggaagagagcgaggcgctggagccggaatcgcgtgccattgagatcccggtcgtttatggcggtacggggggaccggatcttggtgtggtcgcagaccattgcggactcaccgaaaagcaggttgttgagctgcacagttcggtggattacgtcgtctggttcctgggattccagcccggattcccgtatctggggggattatctccccggctgcatacgccgcgccgcgctgaaccgcgcctgagcgtaccggcggggacggtcgcgattggtggcgagcagaccggcgtctatccgctggcttcgcccggtggatggcagctgattgggcataccgccaccccgttatttgaccccgcgctggcgtcgccaatactcctgcgcccgggcgacacccttcgctttatcccgcagaaggagggggtatgttaacgcttattcgcgccgggctttacacctccgtacaggatgccgggcgctttggcatgcgccagtccggcgtgagctattgtggcgcgctggaccgtccagcgctggaaatcgctaacgtgctggtgggcaaccccggcagcacggcggcgctcgaaattacgctcggccagtgtgtcattgagtttggtcaggagacctggttcgcgctcaccggcgccggctgtgatgccacgctggacggcaaagcggtgtggaccggctggcgtctgcgggcgaaagccgggcagcgtctgaccttaaagcgtcctctgcacggcgtgcgtagctatctcgcggtggctggcggcattgatgtgcctgaggtgctgggctcatccagtaccgatcagaaagccgggataggcggtcacgaaggacgtctgttgcgcgacggcgatcgcctggcgattaagccctcttcgcgtcacttctcgacggcgcagggggtgaaacaacttctctggggaaaccagatccgcgccttacctgggccggaatatcatgagttcgacgaggcctcaaaagagtctttctggcgcgcgccgtggaagctcagtccgcagagtaaccgtatgggctatcgcctgcaggggcagccgctgatccggacgaccgaccgggaactgctctcccacggtttgttgcccggcgttattcaggttccaggcaacgggcaaccgatcgtcttaatgaacgacgcgcagacgacggggggctatccgcgaattgcctgcattattgaagccgatcgctaccatctggcgcaaattcccctcggtcagccgattcacttcgtgcagtgttcgctggaggaagcgctaaaggcgcggcaggatcagcagcgctatctcgaacagctggcgtggaggctcgatggtaaagattgatttaaacgccgatctgggcgagggcggcagcgccgacgcggcgctaatgacgctggtctcttcggtcaatattgcctgcggctttcacgcgggcgatgcgcaaaccatgctggagagcgtgcgtcatgccatcaaaaatggcgtggcgattggcgctcacccgagcttccctgaccgggagaactttggtcgcaccgcgatggacctgccgcctgagacggtctacgcgcaggtgctctaccagactggcgcgctggaggcgatggttcgcgccgggaagggcgtactgcgtcacgtgaagccgcacggtatgctctataaccaggcggcaaaagacccggtactggcggcggcgattgcccgtgcggtgcgggactgtaatccgcagctgattctggtcggcctggcgggcagtgagcttattcgtgccggagaacggctggggctgaccacgcggcaggaggtgtttgccgatcggggatacatgccggacggcagtctggttccgcgcacgcaagccggtgcgctgattaccgatgaagcgaaagcgctggcgcagacgctggagatggtgcgctacgggcgagtgaccgccgtggatggcacaacggcgcacgttcaggctgatacggtatgtttacacggcgatggcgagcatgcgctccagttcgcgcgccgcctgcgggccgcgttcgctgaagagggcattcttgtcagcgcagattaatcataaaaggacagaaaaatgccagaaggcccggagatccgccgcgcggcggatagcctcgaggcggcgataaagggcaaaccgctgacggaggtctggtttgcttttcctcaactgaaaccgtttgaatcacagctggtggggcagtcggtaacgcatattgaaacgcgcggcaaagcgttgctcacgcacttttcccataacctgacgttatatagccataaccagctttacggcgtgtggcgcgtggtggaggcgggtgaacagccgcaaacgacccgcgtgctgcgcgtcaggctgcaaacggcggataaggcgatcctgctctatagcgcttctgatatcgaaatgttaacgcctgagcagttgctcacgcacccgttcttacagcgggttgggccggacgtgctggatatgcgcctgacggcgagcgatgtgaaggcccgactgctatcgcccacattccgcaaccggcagttttccggcctgttccttgaccaggcctttctcgccgggcttggcaactacctgcgggtggagatcctctgggaagtcgggctggcaccgcagcacaaagcttctcagctgagcgatgaacagctggaggcgctgtcccacgcgctgctggacatcccgcggctgtcgtacaacacgcgtggcatcgtagatgaaaacaagcaccacggggcgctgttccggttcaaggtgtttcatcgggcggggaataagtgcgagcggtgcggcgggattatcgacaggattatgctctcttcgagacccttttactggtgtccacattgtcaaaaataaacaagccgggtggcggctacgccttacccggcctacgtttcgcatttgtaggcccggtaagcggtagcgccaccgggcttaacttttagcgcttcaggtcagacttaaaatcacgctgctcgtagccggtatacagctgacgaggacgggcgatcttcatgccttcgctgtgcatttcgttccagtgcgcaatccagcctacggtacgcgccatggcgaagatcacggtgaacatggaagacggaatgcccatcgctttcagaataatgccagagtagaaatcgacgttcgggtagagtttcttctcgatgaagtacgggtcgttcagcgcgatgtgttccagctccatcgccacttccagcaggtcatctttggtacccagctctttcagcacttcgtggcaggtttcacgcatcacggtggcgcgcgggtcatagtttttgtaaacacggtgaccgaagcccatcaggcggaaggagtcattcttgtctttcgcgcgacgcacgaactcaggaatgtgctcaacggtgctgatctcttccagcatcttcagcgccgcttcgttggcgccgccgtgcgccggtccccacagggaggcgatgcccgcagcgatacaggcgaacgggttcgcgcctgaagagcctgcggtacgaacggttgaggtcgaggcgttctgttcgtggtcagcatgcaggatcagaatacggtccatcgcgcgttccagaaccgggttcacttcgtactcttcgcacggcgtggagaacatcatgcgcaggaagttgcccgcgtaggagaggtcgttacgcggatacacaaacggctggccgatggagtatttgtaacacatcgccgccatggtaggcattttggacagcagacggtaagcggcgatttcacggtgacgcgggttattcacgtcaagggagtcgtggtagaacgcggccagcgcaccggtaataccgcacatcaccgccattgggtgagagtcacgacggaacgcatggaacagacgggtaatctgctcatggatcatggtgtgacgggtcacggtggttttaaattcatcgaactgggcctgcgtcggtttttcgccgttcagcaggatgtagcacacttccagatagttggattcggtggctaactgatcgatagggaagccgcgatggagcaggataccttcgtcaccgtcgataaaggtgattttggattcgcaagatgcggtagaggtaaatccagggtcaaaggtgaatacccctttggaacccagcgtacggatatcaataacatcctgaccgagcgtgccttttagcacatccagttcaatagcagtgtcaccatttagggtgagcgttgcctttgtatcagccatttacggtctccttagcgccttatgcttaagactgcgctttaccggatttgctttcagctgttaatcaccgttaccagattgttatttggcttaccgctcagctcacgaggacaaaccagggtacagagctatggcgccttgcaggtaaacgaatgaaatatcagtgaaacaacagcaaatcagcgtttttgcagtccgaattattcaaacctgtatatcactaataactgtcctgataacttcggtcaataccatcacactgttacataactatttgtcaggtgaaagagagacctcataacttttgcgcattatatgccttttctgatgacgtttgtaacaatattgtttaacatttgtcaaatcagatgattaaaaattaaaaagatgttgttatcgtgaccctgatcactgttccagagaaaacccgacaaactgtatgtaggttaattgtaatgattttgtgaacggcctatactgccgccaggtctccggaacaccctgcaatcccgagccacccagcgttgtaatgtgtcgtttaagcatctggaagcactgttttgcatgacgcgcagttatagaaaaggaacgctgtctgacccgcatcgcagtccggaggaaggaaacaataagaacagcatgtgggcgttattcatgataagaaatgtgaaaaaacaaagacctgtcaatctggatctcaaaacgatccggttccccgtaacagcaatagcgtccattctgcaccgtgtttctggtgtgattacgtttgtggcggtcggtattctgctgtggttactgggcaccagcctctcttcccctgaaggattcctccaggcctctgccatcatgaacagcttcttcgtgaaattcatcatgtggggcattctgaccgcactggcgtaccacgttgtggtgggtgttcgccatatgctgatggactttggctacctggaagagaccttcgaagccgggaaacgctccgctaacatttcatttgtgattacagtcgtgctttcacttctcgcaggagttctcgtatggtaagcaacgcctccgcattaggacgcaacggcgtacatgacttcattctggtccgtgctaccgccatcgttctcaccctctacatcatctatatgatcggtttcttcgcgaccagcggcacgctggcgtgggaaatctggagtgggttcttcggatccgccttcaccaaagtgttcaccctgctggcccttttctccatccttattcatgcctggattggcatgtggcaggtgttgaccgattacgttaaaccgctggcgattcgcctcccgctgcagctggccattgtggttgcactggtggtttacgttatttatggattcgttgtggtgtggggtgtgtaatgaaactgccagtcagagaatttgatgctgttgtgattggtgccggtggcgcaggtatgcgtgccgcactgcaaatttcccagagtggccagagctgtgcgctgctctctaaagtcttcccaacccgttcccatactgtgtctgcgcagggcggtattaccgttgcgctgggtaactcccatgaagataactgggaatggcacatgtatgacacggtaaaaggttccgattacatcggcgaccaggatgccatcgaatatatgtgtaaaactggcccggaagcgattctggagctggaccacatgggtctgccgttctcccgtctggaaaatggcaccatctatcagcgtccgtttggcggccagtcgaaaaacttcggcggcgagcaggcggcacgcaccgcggcggcggctgaccgtaccggtcacgcgctgctacacaccctgtatcagcagaacctgaaaaaccacaccaccatcttctccgaatggtatgcgctggatctggtgaaaaacgccgatggcgccatcgttggttgtaccgcgctgtgcatcgaaaccggtgaagtggtctacttcaaagcccgtgcaaccgtgctggcgaccggcggtgcaggccgtatttaccagtccactaccaacgcccacatcaacaccggtgacggtgtcggtatggctatccgtgcgggcgtgccggtgcaggatatggagatgtggcagttccacccaaccggtatcgccggtgcaggcgtgctggtaacagaaggctgccgtggtgaaggtggctacctgctgaataaacacggcgagcgcttcatggagcgttatgccccgaatgcgaaagacctggcgggtcgtgacgtggtggcgcgttccatcatgatcgaaatccgtgaaggccgcggctgtgacggcccttggggtccacacgccaagctgaaactcgaccacctgggtaaagaagtgctggaatcccgtctgccgggcattttggaactgtcccgcaccttcgcgcacgtcgatccggtgaaagagccgattccggttatcccaacctgccactacatgatgggcggtattccgaccaaagtgaccggtcaggcgctgaccgtgaacgagcagggcgaagacgtggttattcctggcctgttcgcggtgggcgaaattgcctgcgtatccgtacacggcgcaaaccgtctgggcggcaactcgctgctggacctggtggtgtttggtcgtgcggtgggtctgcatctgcaggaatccattgccgagcagggcgcgctgcgtgacgcgaccgacgacgaaattgatgcctctcttgagcgcctcaaccgctggaacggcaaccgtaacggcgaagatccggtggaaatccgtaaagcgctgcaggagtgcatgcagcacaacttctcggtattccgcgaaggcgacgcgatggccaaaggtcttgagcagctgaaagcgatccgcgagcgtctgaaaaatgcccgtctggacgacacctccagcgagttcaacacccagcgcgttgagtgccttgagctggataacctgatggaaaccgcgttcgcgaccgcgatgtcggcaaacttccgtaccgaaagccgtggcgcccatagccgcttcgacttcccggagcgtgatgacgaaaactggctgtgccattccctgtatctgccagagtcggaaaccatgacgcgtcgtagcgtcaacatggaaccgaaactgcgtccggcgttcccgccgaagattcgtacttactaatgcggagacaggataatgaaactcgaattctcagtttatcgttataacccggatgtagacgacgctccgcgcatgcaggactacaccctggaagcggaagaaggtcgcgacatgatgctgctggatgccttaatccagctgaaagaaaaagatccaaccctgtcgttccgccgctcctgccgtgaaggggtgtgtggctctgacggtgtgaacatgaacggcaaaaatggcctggcctgcatcacgccaatttcagcgttgcagcgtcctggtcagaaaattgttatccgtcctctgccaggcctgccggtcgtgcgtgatttggtggtagacatggggcaattctatgcacaatatgagaagattaagccttacttattgaataatgggcaaaatccaccggctcgtgagcacttacagtctcctgagcagcgtgaaaaactcgatggtctgtatgagtgtattctctgcgcatgctgttctacgtcctgcccgtcgttctggtggaacccggacaagtttatcggcccggccggtctgctggctgcctatcgcttcctgatcgatagccgcgacaccgaaaccgacagccgtctggaaggactgagtgacgctttcagcgtattccgctgccatagcatcatgaactgcgtcagtgtgtgtccgaaggggctgaacccgacgcgcgccatcggccatattaagtcgatgctgctgcagcgcagtgcgtaagtaacgttgccggatggtgctgcgcttatccggcctacgaaactgtaggcccggcaagcgtagcgccaccgggcaaaatgcagaaacctttaaaaactgccctgtactaccctgaagtccagacagtttctaaaggttccttcgcgggccaaatgaaaagagctcgcaggtgaaccccggcacgtacacgtggtgtgcgtggtagtttctacggcgaaagtaagcataaaaatgcttaagggatcacgatgcagaacggcgcaatgaaagcctggctggactcttcttacctctctggtgccaaccagagctggatagaacagctctatgaagacttcttaaccgatcctgactcagtggacgcaaactggcgttccatgttccagcagttgcctggtacaggggtcaaaccggatcaattccattccaaaacacgtgattatttccgtcgtctggcgaaggatgcctcacgttactcttctgcgatttccgaccctgacaccaatgcgaagcaggttaaagtcctgcagcttatcaacgcttatcgcttccgtggtcaccagcatgcgaatctcgatccgctgggactgtggaaacaagaccgtgtggccgatctcgatccggcgtatcacgatctgaccgaggccgatttccaggaaagctttaacgtaggttcctttgccatcggcaaagacacgatgaagctgggcgatctgattgacgcgctcaagcaaacctactgcggctccatcggcgcggaatacatgcacattacctctaccgaagagaagcgctggatccagcagcgtatcgaatccgtagcgggccacgcgaccttctcggctgatgagaaaaaacgcttcctcagcgaactgaccgcagcggaaggccttgagcgctatctgggcgcgaagttcccgggcgcaaaacgcttctcgctggaaggcggcgacgccctggtgccgatgctgaaagagctgattcgtcacgcaggcaagagcggcacccgtgaagtggtgctgggcatggcacaccgtggtcgtctgaacgtactggtcaacgtgctgggtaaaaaaccgcaggacctgttcgatgaattcgcgggcaaacataaagaacacctcggcaccggcgacgtgaagtaccacatgggcttctcgtcagatatcgaaaccgaaggcggtctggttcacctggcgctggcgtttaacccgtcgcacctggaaatcgtcagcccggtggttatcggttccgtgcgcgcgcgtctggatcgtctggacgagccgagcagcaacaaagttctgccaatcaccatccacggtgatgcggcggtgacagggcagggcgtggtgcaggaaaccctgaacatgtccaaagcgcgtggttatgaagtgggcggtaccgttcgcatcgtgatcaacaaccaggtgggcttcaccacctctaacccgcttgacgcacgttctaccccgtactgcaccgacatcggtaagatggttcaggcgccgatcttccacgttaacgcggatgacccggaagccgtggctttcgtgacccgcctggcgctggacttccgtaataccttcaaacgcgatgtgttcattgacctcttctgctaccgccgtcacggccacaacgaagcggatgagccaagtgcaacccagccgctgatgtaccagaaaatcaaaaaacacccgacgccgcgcaaaatctatgctgacaagctggaaagcgacaaagtggcgacgctggaagatgcgaccgaaatggtcaacctctaccgcgacgcgctggacgcgggtgaatgcgtagtgaaagagctgcgcccgatgaacatgcactcctttacctggtcgccgtacctcaaccacgagtgggatgagagctacccaaacaaggtggagatgaagcgcctgcaggagctggctaaacgcatcagcaccgtgccggacgctatcgagatgcagtctcgcgtggcgaaaatttatgctgaccgtcaggccatggcggcaggcgagaagctgttcgactggggcggcgcggaaacgctggcttacgcgacgctggttgacgaaggcattcctgttcgtctgtccggtgaagatgcgggccgtggcaccttcttccaccgtcacgcggtggttcacaaccagtctaacggttcaacctacaccccgctgcagcacgtgcacaacggtcagggccagttcaaggtctgggactccgtgctgtctgaagaagcggtactggctttcgaatacggttacgccacggcagaaccgcgcaccctgaccatctgggaagcgcagttcggtgacttcgccaacggtgcgcaggtggttatcgaccagttcatctcctccggcgagcagaaatggggccgtatgtgtggcctggtgatgctgctgccgcacggctatgaaggccagggtccggagcactcctccgcgcgtctggaacgttatctgcagctctgcgccgagcagaacatgcaggtttgcgtaccgtccaccccggctcaggtttaccacatgctgcgtcgtcaggcgctgcgcggtatgcgtcgtccgctggtggtcatgtcgccgaaatccctgctgcgtcacccgctggcggtgtccagcctggaagagctggcgaacggtaccttcctgccagccatcggtgaaattgacgagctggatccacaggccgtgaagcgtgtggtgatgtgttctggtaaggtttattacgacctgctggaacagcgccgtaagaacgatcagaaagatgtcgccatcgtgcgtatcgaacagctttatccgttcccgcaccaggcggtgcaggaagcgctgaaaccgtacgctcacgttcatgattttgtctggtgccaggaagagccgctcaaccagggcgcatggtactgcagccagcatcatttccgtgaagtgattccatttgggtcagccctgcgctatgcaggtcgcccggcctccgcctctccggcggtagggtatatgtccgttcaccagaagcagcaacaagatctggtcaatgacgcgctgaacgtcgattaattaaaggatacataatgagtagcgtagatattcttgttcccgacctgcctgaatctgtagcagatgcgaccgtcgctacctggcacaaaaaaccaggcgatgccgttaagcgcgatgaagtgctggtagaaatcgaaactgacaaagtggtactggaagtaccggcttcggcggatggcgttctggacgcggtgctggaagacgaaggcaccaccgtcacctctcgtcagatcctgggtcgcctgcgtgaaggcaacagcgcgggcaaagagtccagcgcgaagtctgaagagaaagcgtctacgccagcgcagcgccagcaggcctctctggaagagcagtctaacgacgccctcagcccggcgatccgtcgcctgctggcggaacacagccttgacccggcagccattaaaggcaccggtgtgggcggtcgtctgacccgtgaagacatcgacaaacacctggcgaaagcgcctgctcaggcggaagcgaaagcccctgcggcagcaccggcagcacagcctgctctgggcgctcgcagcgaaaaacgcgtgccgatgactcgcctgcgtaagcgcgtggccgagcgtctgctggaagcgaaaaactctaccgcgatgctgactaccttcaacgaagtgaacatgaagccaatcatggacctgcgtaagcagtacggtgacgcgttcgaaaaacgtcacggtatccgtctgggctttatgtccttctacgtgaaggcggtggttgaagcgctgaaacgctacccggaagtgaacgcgtccattgatggcgatgacgtggtttaccacaactacttcgacgtcagcatggcggtttctaccccacgtggcctggtgaccccggttctgcgtgatgtggataccctgggtatggccgacatcgagaaaaacattaaagagctggcggtgaaaggccgcgacggcaagctgaccgtagacgacctgaccggcggtaacttcaccattaccaacggcggcgtcttcggctcgctgatgtctaccccgatcattaacccgccgcagagcgcgatcctgggtatgcatgccatcaaagatcgtcctatggcggtagacggtaaagttgagatcctgccgatgatgtacctggcgctctcttacgaccaccgcctgatcgacggccgcgagtccgtgggcttcctggtagccattaaagagctgctcgaagatccaacgcgtctgctgctggacgtctagtcacgatttagcatcacctgccccgtagaccggcacacgctgcgccggtctacaggtttgaagataacgattaccctgaaggatggatagaacacatgaacttacatgaatatcaggccaaacagctgtttgcccggtatggcttaccggctccggtgggttatgcctgtactaccccgcgtgaagcagaagaagccgcatctaaaatcggttccggcccgtgggtagttaagtgtcaggttcacgctggtggccgtggtaaagcgggcggtgtgaaggttgttaagagcaaagaagagattcgtgcgtttgctgaacattggctcggcaagcgtctggtaacctaccagacagatgcgaacggccagccggttaaccagatcctggttgaagcggcaaccgatatcgcgaaagagctgtacctgggcgcggtggttgaccgtagctcccgtcgcgtggtgttcatggcatctaccgaaggcggcgtggaaatcgaaaaagtggcggaagagaccccgcacctgatccacaaagtggctatcgatccgctggcaggcccaatgccttaccagggtcgcgagctggcgttcaaactgggtctggaaggcaagctggttcagcagttcaccaagatcttcatgggtctggcgaccattttcctggagcgcgatctggcgctgatcgagatcaacccgctggtgatcacgacccagggcgatctgatctgcctcgacggcaagctgggcgctgacggcaacgcgctgttccgccagccggatctgcgcgaaatgcgcgaccagtctcaggaagacccgcgtgaagcgcaggctgctcagtgggagctgaactacgtggcgctggacggtaacatcggctgcatggttaacggtgcgggcctggcgatgggcaccatggacatcgttaagctgcatggcggtgagccagcgaacttcctcgacgtgggcggtggcgcaaccaaagagcgcgtaaccgaagcgttcaaaatcattctctccgacgacaacgtgaaggccgttctggttaacatcttcggcggcatcgtccgttgcgacctgatcgccgacggtatcatcggtgcggtagaagaagtgggtgttaacgttccggtggttgtgcgtctggaaggtaacaacgctgaactcggcgcgaaaaaactggctgacagcggcctgaatattattgcagcgaaaagtctgacggatgcagctcagcaggttgttgccgcagtggaggggaaataatgtcagttttaattaataaagataccaaggttatctgccagggcttcaccggtagccaggggactttccactccgaacaggcgattgcctacggcacgcagatggttggcggcgtaacgccaggtaaaggcggcaccacgcatctgggcctgccggtgttcaacaccgtgcgtgaagccgtagaagcgacgggcgcaaccgcgaccgtgatctacgttccggcgccgttctgcaaagactctattctggaagcgatcgacgcaggcatcaaactgatcatcaccatcactgaaggcatcccgacgctggatatgctgaccgtgaaggtgaagctggatgaagctggcgtgcgtatgatcggcccgaactgcccaggcgttatcaccccgggcgaatgcaaaatcggcatcatgccgggccacattcacaagccgggtaaagtgggcatcgtgtcccgttccggtaccctgacctatgaagcggttaagcagaccaccgactacggtttcggccagtccacctgcgtgggcatcggcggtgacccgatcccgggttctaacttcatcgacatcctgaagctgttccaggaagatccacagaccgaagcgatcgtgatgatcggtgagatcggtggtagcgcggaagaagaagcggctgcttacatcaaagaacacgtgaccaagccagttgtgggctacatcgcgggtgtgaccgcgccgaaaggcaagcgtatgggtcacgcaggcgcgatcatcgccggtggtaaaggtacggctgatgagaaattcgcagcgctggaagccgcaggcgtgaagaccgttcgcagcctggcggatatcggcgaagcactgaaatccatcattaagtaagtcctctctgctccccgaaaggggggcgttgcagtataaaaatgtccgtttcgacatggttggccgctgtaaagcggccttttttattgcctgcgtctggcgactagcgtgaacttgtaatcatcggtattgaacacgttgcggctgtattcaaatacccgcccgtccttcagaaacccgcgggagactttttccaggatcggctttgccggatcgagcgacagcgcggcgatcgcctcctctgacggcatgatcggcaccagctcctgctcgctgcgatcgataaccagctttttgatctgctcaacgtagtggtatttcgaattctccatcacttcccaggtgaggtcggggaacagggccagcggcatccacgtttcttccagatttaccggtttttgtttgataaagcggacgcgtttaacgtgccagactttatcgtcatgagagagattcagcttttcggcaagttttgcatcggctttcagcacttcgaaaatgctcacctcactgtgggtatccacgttccggtccgccagtttttcgtaaaacccggtgagctggtaaatgtcgtaattgacgcgctcttcttttacgtaggtgccgctgccctgaatgctctcgacgatctgctcttccgtaagcagcttcagcgcctgtctcaccgtgacgcgactcacgttgaatgcctcctgaaggctggattccgtcggtaacgcatcgccaggctttaactctcccgcactgattttttcgcgaagcgcatcggctatttgccggtacatcggtttgttacccatcgaatctgcctttctaataccttttcatggaattatgcctcccgcttaaaatttgtaaataatataacttaaatacaaattttcgttgttagtgaaaatgatcacataaatgtattgtatgacctgccacaattgccgccagacaataacaacgtatgtgtgaggatcttatgaacctgacgactctgacccacaccagtgctgtccgcgtgcaggcgcactatgccagccgtgatgaggccattcgccagcttacaatgcggctggtggcgctgggcaaaattaccgatggcgaggcatttttggcggaggtctaccgtcgcgaatcgcagggaccaaccgcgctgggtgaagggctggctgtcccgcatggtaaatcgaacgcggtgaacgaagcggcttttgcggttgctacgctgcgcgaaccgctggagtgggagggggtggacggccctgaacgcgtagagctgatcgtcctgtttgccatcccgccagctgaagcgggatccacgcatattcaggtgctgacggcgctgacgtctcgccttgccgatgatgccctccgggaacgcgttatggctgccgggacggcagaggatctccttgatgcgctgaacggtgtctcgaaggaagacgaggctgatacgccggagaatgcaccaaccatcgtctgtgtcaccgcctgtccggccgggatcgcgcatacctatatggccgcagagtacctggagaaagcgggacgtaagctcggcgtcaacgtggtggtcgaaaagcagggggcgaacggtattgaagggcgcattcctgcccagcagttggtggaggcgaaagcgtgtatttttgccgcagaagtggcgatcaaagagagcgagcgctttcaggggatccccgccatttccgtgcccgttacggaacccctgcgtcatgctgaagcgttgattgagcgcgcgctggcgctaaagccttctaccgatgcgcgccatgcgcaggtcgataccgaaacgaaaaagcgcgttaaaactgaactcaagcaggcgcttctcagcggcatctcttttgcggtgccgctgatcgttgccggcggtacggtgctggccgtatcggtactgctggcgcaaatccttggcctgcagcacctgtttgaccaggaaaactcgtggctgtggatgtaccgcaagcttggcggcggcatgctcggcattttgatggtgcctgttctctcggcctacaccgcctactcgctggcggataaacccgcgctgacgccgggctttgcggccggtctggctgccaacatgatcggctccggttttctcggcgctatcgtcggtgggctgatcgcgggctatctgatgcgctgggtgaaaaaccacatccggctcagtagccgctacaacggctttctgactttttatctctatccggtgattggcgtgctgggcgcgggcagcctgatgctgtttgtgattggcgaaccggtggcctggctcaataacacgctcaccgtctggcttaacggtctctccggcgcgaatgcgctgcttctgggggcaatcctcgggtttatgtgctcattcgatttgggcggcccggtcaacaaagcctcttacgcgttttgcctgggggcgatggcgaacggggtatacggtccctatgccatctttgcctccgtcaaaatggtctcagccttcaccgtcacggcgtcaacgatgctggcaccgaagctgtttaagtcgtttgaaattgaaaccggtaaatcgacctggctgctcggcctcgcgggcattaccgaaggggcgattccgatggcgattgaagacccgcttcgcgtcattggctcatttgtactcggatccatggtgacaggcgcggctgtcggtgcgatggggatcgggttgtctacgccgggggccgggattttctctctttttttacttcacgatgccgggttgggcggtgtggttgctgcggcgggctggtttggcgcggcgctggtggggaccgctatctccaccctggttctgctgctctggcgacgccaggcggtaaaaaagggcaactacgtcactgaagacgccttatcgtaaaaacgcacaaacaggaaacgaagatgaaagctgtatctcgcgttcatatcacgccgcatatgcactgggaccgtgagtggtacttcaccaccgaagagtcgcgtattcttctggtcaataatatggaagagatcctgacccggctggagcaggatgatgagtacaaatactatgttctcgatggacagacggctgttctggaggattattttgccgttgtgcccgaaaaccgctctcgcgtgaaggcgcttgtcgagcgcggaaagctgattatcggcccctggtatacccagaccgataccacgatcgtgagcggcgagtcgattgtccgcaacctgatgtacggcatccgggattgtatggccttcggcgagccgatgaagatcggctatctgccggattcgtttggcatgtccggccagcttccgcatatctataacgggtttggcattacccgcacgatgttctggcgcggttgttctgaacgccacgggaccgataaaaccgaatttctctggcagagccaggacggcagtgaagtgacggcacaggtgctgccactgggctacgcgattggtaagtacttaccggaggacgaagcggggctgcgaaaacggctcgacagctatttcgaggttctggaaaaggcgtccgttactaaagcgattttgctgcccaacggccacgaccagatgccgctgcagcagaacattttcgcggtgatggagaagctgcgtgaaatctatccgcagcgtcaatttgtgatgagccggtttgaggaggtctttgatcgcatcgacgcgcaccgcgacgatctggcgaccttaaaaggcgagtttatcgacgggaaatacatgcgcgtgcaccggaccatcggctccacgcgcatggatatcaaaatcgcccatgcgcgtattgagaacaaaattgtcaacatcctcgagccgctggcgacgcttgcctggacgctgggcttcgactaccaccacggcctgctggagaagatgtggaaagagatcctcaaaaaccacgctcacgacagcatcggctgctgctgcagcgacaaggtgcatcgcgagattgtctcccgctttgaactggctgaggacatggcagataacctggcgcgtttctatatgcgcaagattgtcgacaacatgccgcaaagcgatgccgataagctggtgatgttcaacctgatgccctggccgcgtgaggaggtgatgaacaccacgattcgactgcgcgccagccagttccgtctgcgggatgacaaaggcaacgagatcccgtatttcatccgcagcgcgcgcgagctcgacccgggcctcattgaccgacagattgttcactacggcaattacgaaccgtttatggagtttgatattcagctcagccagatattgccgtcgatgggctaccgtacgctgtttatcgaacctaacgtggccgggaaggcgctctctccgggggaaaataccgcctccctacttgaaaacgccttctggcagattgacgtaaatgacgacggtttgctgcgcctgcgcgacaaagaaaccgggcttatttatgaccgcgtgctggaaatcgaagagagctcggatgatggcgatgagtacgactactcgccttcgcgggaagagtggagactcacttccgcgcagggcgagcatgaatttgaggttacgcatgaaggctggcagagcagggcagttatccgccatcgaatcgccgttccggcgaacctggcggagcgcgcggcgcgccagcgaaacggctacctcgacgctgaatttgaaattacgctaagccgcaatagcagacgcattgacgtggcggtgcgcctggataatcaggccgacgaccaccgcgttcgcgtgctcatcccaacgccgtttgcgacccgggaggtgttagcggatacgcagtttggcacgatctctcgtccggtgcaggacgcggcgatgcaaaactggcaggaggaggggtggaaagaagcgccggttcccgtctggaatttactcaactacgccgtcctgcaggaaaaacgaaacgggcttgcgctatttaccgaggggctgcgtgaatttgaagtcgtgggcgatgaacaaaaggcatttgctctgaccttgctgcgcggcgtgggggtactcggcaaagaagatctgctcctgcgccccggcagaccatccggtattaaaatgccggtcccggacgctcaggtgcgtggtccgctaagctgtcgctttagcctcttcagcttcagcggcacgccggaaaacgcgggtgtcgcgcagcaggctcaatcgtggttaacgccggtgcagtgttataacaagatcccctgggatgcaatgaagctgaatcgcgcgtcgttgaccacgccggaaagttacagcctgttagcgctttcgccaacgggatgcgtactcagtgcgatcaaaaaagcggaagatcgtgatgagctcattcttcgtctgttcaacccttcgcagtccagcgcatgtgacgcgacgctatccgtcaatccggcggtgaagcggtgctgcgaaacggacatgaatgaacggctgatggaccacgatgaagacgaaggcattgtcggggcgttcagaccgggacagtcgcgaacctttagccttcttcttgcctgagaatcgctgatatcattaaaaggctgcactgtttgcggcctttttcattaaatagtcactccgcggtgttaagttatggggtgacaaaagtaaaataaatgtaattacgaagggttgcataaatgccgtggaaaaataacccgccccgactatgctttattgtttgccgcgcatcgaaatgaggcttttgtttcgcgttaattaaaatcacttctgtttatattttttttcgtcttcgataaccaatcacatctttacatgcacatatcattaacatggtttttaccattctcaccacgattaaacatagttaacatcaaggtttgtttttgatttaaatcaaagtttaatccttggaaaaaggtgctgaaaagcgctaaattgttcccgatcaaaatggccgaaaagtggtaattttgctataaattgatcaccgtcgaaaaacgtaaatgtgattcaataaaaacctgtttattgtaagggttttgcagcgtattatatttgcggtatcaatttgagttttttattaacgtatttgtaacctcacgtcatcgtttttatcctccttcagggtaataacgacgacaaggatgcgaataatttgtattggggcatgcgtgtggatctctttctgacggggttcactctcggagtcttcatgcgatgagcaaggagtcatgatgttagatatagtcgaactgtcgcgcttacagtttgccttgaccgcgatgtaccacttcctgtttgtgccactgacgctcggtatggcgttcctgctggccatcatggaaacggtatacgttctctccggcaaacagatttataaagatatgaccaagttctggggcaagttgtttggtatcaacttcgcactgggcgtggcaaccggtctgaccatggagttccagttcgggactaactggtcttactattcccactatgtcggggatatcttcggtgcgccgctggccattgaaggtctgatggcattcttccttgaatccacctttgtaggtctgttcttcttcggttgggaccgtctgggtaaagtccagcatatggcggtgacctggctggtggcattaggttcgaacctgtccgcgctgtggatcctggtcgcgaacggctggatgcagaaccctatcgcgtctgatttcaacttcgaaaccatgcgtatggagatggtcagctttgccgagctggtcctgaacccggttgctcaggttaaattcgttcacaccgtcgcctctggctatgtgtgcggcgcgatgtttgtactgggtatcagttcttactacatgctccgcggtcgtgacttcgcgtttgctaaacgctcctttgctatcgctgcaagcttcggtatggctgcgattctctccgttattgttctgggtgatgaatccggttacgaaatgggtgacgtgcagaaaaccaaactggccgctatcgaagccgaatgggaaacccagccggcacctgctgcctttacgctgttcggtattcccgatcaggacgcgcaggaaaaccgcttcgctattcaaatcccttacgcgctgggtatcatcgccacccgttctgttgataagcaggtgacgggtctgaaagagctgatggtgcagcacgaagagcgtatccgtaacggtatgaaagcctactcgctgctggaacagctgcgtgccggttctaccgaccaggccgttcgcgatcagtttaacgacgtgaagaaagatctgggttacggtctgctgctgaagcgttataccccgaacgtttctgatgcgacggaagcgcagatccagatggcaaccaaagactcaattccacgcgttgcgccactgtacttcgcattccgtatcatggtgggctgcggcatcatcatgctgctgatcattgcggcgtccttctggtccgtgattcgcaaccgcatcggcgagaaaaaatggctgctgcgcaccgcgctgtacggtattccactgccgtggatcgcgattgagtccggctggtttgtggcggaatatggccgtcagccatgggcgatcggtgaggtgctgccaacggcggtagcgaactcgtccctgaccgcaggcgacctgatcttctccatgctgctgatttgtggtctgtacaccctgttcctggtggctgaactgttcctgatgttcaagttcgcgcgccttggcccaagcagcctgaaaaccggtcgctatcactacgagcagtccactgcgactactcagccggcacgctaagacaggagtcatcaaatgatcgattatgaagtattgcgttttatctggtggctgctggttggcgttctgctgatcggtttcgccgtcacggatggtttcgacatgggggtggggatgctcacccgtttcctcggtcgtaatgacaccgagcgtcgaatcatgatcaactccatcgccccgcactgggacggtaaccaggtgtggctgatcaccgcaggcggcgcgctgttcgctgcctggccgatggtctacgcggctgcgttctccggtttctatgtggcgatgattctggtgctggcctctttattcttccgtccggtcggtttcgactaccgttcgaagattgaagatacccgctggcgcaacatgtgggactggggcatcttcatcggtagcttcgttccaccgctggtgatcggcgtggcgttcggtaacctgctgcagggcgtaccgttccacctggacgaatacatgcgtctttactacaccggtaacttcttccagctgctgaatccgtttggtctgctggccggtgtcgtcagcgtggcgatgatcatcactcagggtgcaacctacctgcagatgcgtaccgtaggcgagctgcatctgcgctcccgcgcgacggctcaggttgctgcgctggttacgctggtctgcttcgcgctggccggtgtgtgggtggtgtacggtattgatggctacgtggtgacgtctgccattaaccacaccgcaccgtctaacccgctgaccaaagaagtggcgcgtcaggcgggagcatggctggtgaacttcaacaatacccctgtgctgtgggcgatcccggcgctgggcgtgctgctgccgctgctgaccatgttgacgtctcgtctggaaaaaggcgcgctggcgttcgtgttctcttcactgactctggcatgcatcatcctgacggcgggtattgcgatgttcccattcgtcatgccatccagcaccatgctgaatgctagcctgaccatgtgggatgcaacgtccagccatatgacgctgaacctgatgacgtatgttgcttgcgtgttcgttccgattgttctggcctacaccatctggtgttactggaaaatgttcggtcgcatcacgaaagaacatatcgaaagcaatacccactctatgtattaagtaaggagctgaatatgtggtatttcgcatggattttagggacgcttcttgcctgtgcatttggtgtcatcactgccctggcgcttgagcacgtagaagcgaccaaagcgggtgaagaaaaacactgatgaatattatcgcgaaactttacgcggtaatggataagcgcccgttacgggcgctttctttagtgatggcattactgctggcaggctgtatcttctgggacccttcgcgctttgcagcgaaaaccagcgagcttgaaatctggcacggcttcctcatcatgtgggcggtgtgcgcaggtgtgatccacggcgtgggctttcgtccgaaagccgttcactggcagggaattttttgcccgccgatcgccgatctggtgctactcgccggtttgattttcttcttcttctgaataagaaatgtccgttaacgttatgggcttacccgagcccataaaaatttactctccgtttactttcccccattccaaaccatctttcccgcgcgtatagtagcgaagtttaaaagctctaacttttgttgcattactgggatgtaaagtgaatacaacgctgtttcgatggccggttcgtgtctattacgaagataccgatgccggtggtgtggtttaccacgccagctacgttgctttttatgaacgggcacgcacagagatgctgcgccatcatcactttagtcaacaggtgctgttggctgagcgagttgccttcgtggtacgcaagatgacgcttgagtattttgcgcctgccagactcgacgatatgctcgaagtccaaactgaaattacatcaatgcgcgggacctcactggttttcacgcagcggatagtcaacgcagagaataccgtactgaactcagctgaagtgctgattgtttgtgttgatccaaccataatgaagcctcgtgcgcttcctaagtctattgtcgcggagtttaagcagtgactgacatgaatatccttgatttgttcctgaaggcaagccttctggttaaacttatcatgttgattttgattggtttttcaatcgcatcctgggccatcatcatccagagaacgcgtatcctcaatgccgctggccgtgaggctgaagcgtttgaagataagttctggtcgggcattgagctttctcgtctgtaccaggagagccagggacgtcgtgaaaacctgaccggctccgagcaaattttctatagcggcttcaaagagttcgcccgtctgcatcgtgcaaacaatcatgcgcctgaagcggtggtggaaggtgcctcgcgcgcgatgcgcatttcgatgaaccgcgagctggaaaaccttgaaacgcatattccgttcctcggtactgtcggctccatcagcccgtatatcggtctgtttggtaccgtgtgggggatcatgcacgcctttatcgcgctgggcgcggtgaagcaggccacgttgcagatggttgcaccgggtatcgctgaagcactgattgcgaccgctatcggtctgtttgcggcaattcctgcggttatggcttacaaccgtctgaaccagcgcgtgaacaaactggaactgaactacgacaactttatggaagagttcactgcgattctgcaccgtcaggcgtttaccagcaccgagagcaacaaggggtaaaccatggccagatcgcgtggacgaggtcgtcgcgagctcaagtccgaaatcaatatcgttccactgctggacgtcctgctggtactgctgctgatcttcatggcaacagcgccaatcattacccagagcgtggaagtggatctgccggatgcgacagaatcacaggcggtgagcaccaatgacgatcctccggttatcattgaggtttccggcgtagggcaatacagcgtcgtggtagaaaaagatcgtatggatcagctgccacctgagcaggttattgccgaagcgcagcgtcgcctggagtcaaatccgaaaacggtcttcttaatcggtggcgcgaaagacgtaccctacgatgaaattattaaagcgctgaacttgctacatagtgcgggtgttaagtcagttggcttaatgacccaacctatttgatcatccgcgtagtttttgggaaccgatagtgtcaaaggcaaccgaacagaacgacaagcttaagcgagcgataatcgtctccgcagtgctgcacgttattctctttgcagcgctgatctggagttcgttcgacgagcatattgatgcatcagccggcggcggtggaggatcttccattgacgccgtcatggtggatcccggtgcggtagtacagaactataatcgccaacagcagcagaaggcgagtgcaaaacgggctgaagagcagcgtgaaaaacaggcgcaacagcaagcggaagaactgcgtgaaaagcaggctgccgagcaggaacgtctgaagcaacttgaaaaagaacgtttgcaggcgcaggaagccgcgaaagcgcaggcagagcagcagaaacaagccgaagaggccgcgaaaaaagcacaggaacagcaaaagcaggcggaagaggcggcagcaaaagccgcagcagacgcgaaagcacaggctgatgcccaggcgaaattagcggcagaagcggcgaagaaagcggctgctgatgcccagaagaaagcggaagccgaagccgcgaagaaagcggccgctgatgctcagaagaaagcggaagccgaagccgcgaagaaagccgcagctgatgctcagaagaaagcagaagcggaagccgcgaagaaggccgctcaggaagcagagaagaaagctgctgccgaggccgcgaagaaagcggctgctgcagagaaagcagcagcagaaaaagccgcagcagaaaaagcggcagctgccgaaaaagccgctgctgacaaaaaagctgcagctgagaaggccgctgccgataagaaagcagcagcagaaaaagcggctgctaaaaaggctgccgccgctgaaaaagccgctgctgccgcaggggttgacgatctgctcggcgatttgagctccggtaagaatgcgccgaaaacgggcggtggggcgaaaggaaacaacgcagcgccgaccggaagtggtaacactaagagtaacggtgcgacaggggctgaaatcaacggttatgccgcgcagattaaatccgctattgaaagccgattctatgatgcgtcttcctataccggtaaaacgtgtacgttgcgtataaaactggctccggatggcatgctgctggatattaagtctgaaggtggcgacccggctttatgtactgcggccctggctgcagcgcgtcaggcgaagatgcctaaaccgccttcgcaggcagtctacgaagtcttcaaaaatgcgccgctggacttcaaaccttaagttacattttccccgtgcaaacggggaaaaattgaccaggtttagtcacagggttcgggtagttttgtctatttgagtttgttaacattctgctaaattatcgtgggtaaggttacccggataagggagatatgatgaagcaggcattacgtgtagcatttagttttttaatgctgtgggcagcagtactgcacgcagaagtacgtatcgagatcacccagggggtggactcggcacgcccaatcggtgttgttccgttccagtgggccggtcctggcgctgcacctgaagatgccggtggcatcgtggcggctgacctgcgtaacagcggtaaattcaacccgttagatcgttctcgcctgcctcagcagccgggtagcgcgcaggaagtacagcctgcagcatggtctgcactgggtattgatgccgtggttgtgggtcaggttacccctaatccggacggttcttacaacgtggcttggcagctggtggataccggtggtgcaccaggtaccgttctggcccagaactcttacaaggtcactaagcagtacctgcgctacgcggcacacgctgccagcgatgcggtatttgaaaaactgaccggcattaaaggcgcgttccgtacccgtatcgcgtacgtggtgcagaccaacggtggtcaattcccgtatgagctgcgcgtatctgattacgatggctacaaccagttcctggtgaaacgctcctcgcagccactgatgtctccagcctggtctccggacggttctaagctggcgtatgtgaccttcgaaagcggccgttctgcgctggttatccagacgctggcaaacggtgcggttcgtcaggtggcgtctttcccacgtcacaacggtgcgccttcattctctccggacggctctaaactggcgtttgcgctgtcaaaaaccggtagcctgaacctgtacgtgatggacattggctctggccagatccgtcaggtgaccgacggtcgcagcaacaacaccgaaccttcatggttcccggacagtcaaaacctggcgtttacctctgaccaggccggccgtccacaaatctacaaagtcaatattaacggcggtgctccgcagcgtattacctgggaaggttctcagaaccagaactcagacgtgagcagcgacggtaaatttatggtaatggtcagctccaacggcgggcagcagcacattgccaaacaagatctggtagcgggtggcgtgcaagttctgtcgtcaacgttcctggatgaaacgccaagtctggcacctaacggcactatggtaatctacagctcttctcaggggatgggatctgtgctgaatctggtttctacagatgggcgtttcaaagcgcgtattccggcaactgatggacaggtaaaatcacctgcctggtcgccgtatctgtaaataataattaattgattactaaaggaatcatagaaatgcaactgaacaaagtgctgaaggggctgatgatcgctctgcctgtaatggcaatcgcagcgtgttcttctaacaagaacgccagcaatgaccagagcggcgaaggcatgatgggtgccggcaccggtatggacgcgaacggcaatggcaacatgtcttctgaagagcaggcgcgtcttcagatgcagcagctgcagcagaacaacatcgtttacttcgatctggataaatacgacatccgttctgacttcgctgcgatgctggatgcgcacgctaacttcctgcgtagcaacccatcttacaaagtcaccgtagaaggtcacgcggacgaacgtggtactccagagtacaacatctccctgggtgaacgtcgtgctaacgctgttaaaatgtacctgcagggtaaaggcgtttctgctgaccagatctccatcgtttcttacggtaaagaaaaacctgcagtactgggtcacgacgaagcggcttactccaaaaaccgtcgtgccgtactggtttactaagagaattgcatgagcagtaacttcagacatcatctgttgagtctgtcgttactggttggaatagcggccccctgggccgcttttgctcaggcaccaatcagtagtgtcggctcaggctcggtagaagaccgggtcactcaactcgagcgtatttctaacgctcacagccagcttttaacccaactccagcaacaactttccgataaccagaatgatattgactctctccgcggtcagattcaggaaagccagtatcagcttaatcaggttgtggaacgtcagaagcaaatcttgttgcagatagatagcctgagcagcggtggtggtgcagcagcgcagccagccgcaggcgatcagagcggtgcggcgacgtctacgccagcgccatcagctgatacgtcagcctcaacaggcacgtctgtacagagcggtgacgcgaatacggactacaatgcggccattgccctggtgcaggatcaatctcgtcaggatgacgcgattgctgcgtttcagagctttgttaagaaataccctgattccacttatcagccaaatgccaattactggctcggtcagttgaattacaacaagggtaaaaaggacgatgcggcgttttattttgcctcagtggtgaaaaattacccaaaatcgccgaaagcgccagatgcgatgtataaggttggcgtgatcatgcaggacaaaggcgacacggcgaaagccaaagcggtttatcagcaggtggtcgcaaaattcccgggtaccgaaggtgctaagcaggcgcaaaaacgtctgaattcgatgggatgattatcgcatgaccagaaatcgcgttatttctggtcgtgcagcatgattactaagcagttaagtgatcttcatcgaaatttttgttgcgcagaattcttaaatcagtaatatatgccgccgttgccacgggatatcaaacaacgtgaaagcagcataaaagtgggtcgttagctcagttggtagagcagttgacttttaatcaattggtcgcaggttcgaatcctgcacgacccaccacttaacgcagttccggcagtacagagtgggtgattagctcagttggtagagcatctcctttacacggagggggtcggcggttcgagcccgtcatcacccaccactcgggtcgttagctcagttggtagagcagttgacttttaatcaattggtcgcaggttcgaatcctgcacgacccaccactttaaagtggtaccgagtaaaaatcttcgaagtcagcacccgaatgggtcgttagctcagttggtagagcagttgacttttaatcaattggtcgcaggttcgaatcctgcacgacccaccacttcgaagaaaaaaatcccgcaaggggtcgttagctcagttggtagagcagttgacttttaatcaattggtcgcaggttcgaatcctgcacgacccaccagtgtagaaaggcgccctaaaggcgcctttttgctatctgcggtacaacaaatgctccgcccatctattcccggtgacttttcacgccagattcgctatcttgtttagtatacaaaacacaattgccacgcgttttgctatgttaggcaaatgaaaggcaatattgttaagcccgtaaaacgagaagccataatgagtgtgatgtttgatcctgaagccgcaatctatccgtttccgcctaagcctgtcccactgagccaggacgaaaagcagttctaccgcgagaagattaaacgtcttcttaaagagcgcgacgcggtgatggtggcccattactacactgacccggaaattcagcagttggcggaagagaccgggggctgcatttctgactcactggagatggcgcgcttcggtgcacggcatcccgcttccacgctgctggttgccggcgtgcgttttatgggcgaaacggcaaagatcctgagcccggaaaaaaccattctgatgcccacgcttaacgcggagtgttccctggatctcggctgtccgattgacgaattcacggccttctgtgatgcccaccctgaccggaccgtggtggtttacgcgaacacgtcggcagcagtgaaagcgcgggcagattgggtggtcacgtcaagcatcgccgttgagctgattgaacatctggatagtctgggggagaagattatctgggcgcctgatcgccatctcggcaattatgttaagaagcagacgggggctgacgtactctgctggcagggcgcctgtatcgttcatgatgagttcaagacgcaggcgctggcgcgcatgaaggcgctttatcctgacgccgccattcttgtgcatcctgaatctccgcagtcgattgtcgacatggcggatgcggtgggttcaaccagccagcttattaacgcggccagaacgttgcctcacaagcagcttatcgtggcgaccgatcgcggtatcttctacaagatgcagcaggccgtgccggagaaagagcttcttgaagcgccaacggcaggcgagggggcaacgtgccgcagctgtgcgcattgcccgtggatggcgatgaacggcctgaaagcgattgccgaagggttagaaaccggtggtgcggcgcatgaaatacacgtggatgctgccctgcgtgaaggcgcgttaattccgcttaaccgcatgctggattttgcggctacactacgtacttaattcactacgcccggggaaaagatggatttttttagcacacagaacattctggttcatataccgattggtgcaggtggctatgacctgtcatggattgaggccgttggtacgctggcgggactattgtgtatctggctggcaagccttgagaagatcagcaattatgcgttcgggctgattaacgtcacgctgtttgcgattattttcttccagatccagctgtacgccagcctgcttttgcagctgttcttcttcgccgccaatatttacggctggtatgcgtggtcgcgtcagaacagccaacaggaggcagagctgcagattcgctggctgcccttgccgaaagccatcgcctggtttgtcgcctgcgtggtggccattggcttaatgaccgtcttcatcaatccggtatttgcgttcctgacccgcattgccgtttcggtcatgtccggcatcggcctgaacgtgacgatgccagagctccagccggatgctttcccgttctgggattcctgcatgatggtgctgtcgattgcggcgatgattctgatgacccgtaaatacgttgagaactggctgctgtgggtcatcatcaacgttatcagcgtggcgatcttcgccctgcagggcgtctatgccatgtcgctggaatatctgttgctgaccttcatcgcgctgaacggtagccggatgtggattaacagcgcgcgtgagcgaggctctcgcgcgctttccagctagtggtcatgatgatgtgaatgaccggactgcgcctcgttaaggtggcagtccggtccgctacagggctgatactccatctgaacggtggcatggctaatgtcgtagtgatgttccaggaagtgctggatgcgatcgagcagcgcatcgtggtcgtgaggcgggatcacctggacatggagcgtcatgaccggtttctcccccaccagccagacgtgcacgtggtggacattgcggacttccggaacagtacggcgcaggttgcgcttcagctcgtcgatgtccatggatgccggagccccttcaagcagttcattcacgctctccttcagcagccgccaggcgctgcgcaagaccagacacgacaccagcacggacaaaatcggatcgacaggcgtccagccggtatagaggatcaccagcgcggcgacaatcgccccgactgaaccgagcagatcccccagcacatgcagagccgccgcgcgcacgttgaggttcttttcctcgctgccgcggtgcaaaatccagaaggccaggatattcgccaccagccctgccacggcaatcaccatcatggtcgccccggcaattggctgaggatgtctgaagcgctgaatggcctcccagacgataagaatggtaatgaccaccagggcaatcgcgttaacaaaggcggcaagggtcgtcagcctcagccagccgaaggtatggcgtgtattggggggacgacgggcaaactggacggccagaagggcgaaaagtagcgccgctgcatcggtaagcatatgcccggcgtcagccagtagcgccagagagccggagaccagaccgccgatgacctcaataatcatgaaggttgcggtgacgccgaaggccagcagcaatcgtttagcgttgtcgtcgccggcggcgtgggaatgtgtgtgtgccatgttatctttcctgattcgttatcgtttttagtgtagcgtttttaataggttactcaaaaagaaaggagagccttagctctccttttatcattaatttcacagccggttactgagtcgtaccatctgttttggtattggcatcatcccccactttgtcattcgggtcgggacatttgccatctttacacatggagttcttatgaacttcatctttgctcatgctgtcatgatttatggtgccggagtcggtaccgttggggtgcagcatggtgccgccggtgttggtgtttccattattaatctgactattatcgacattgttcggggcgacgttctgtttggcatcaggggcgacctggcctgctgacgcagccgcgtttgcatcaccgttacccgatgagcccgtttcggccgcaagaacgctaccgctggccagggtgagggtggcggtcaggaagagggttgccagttttgtcattttcatcatggtgctcctgttcttgtcgttacgctggataactttttccaacagtgcatctttttcagaggcgaaagattccgccatacggacttacgtcagtcgggaatcgcgtttaagcgtgtaaaaatggttgttacagttaaaaagcttaggttagatctcgtttttcgctattttgtggcgatttttaggcgaattccaggaattatctgcgtgaagtgtaaaaccgtgtttacacttcctgagcgacaagatagattgaaaggattgctttcattactaaagatatggcagagctggaacgaagatgaattatcagaatgacgatttacgtattaaagagatcaatgagttattacctcctgtagcactccttgagaaattccccgccactgaaaatgccgcaaacacggtttctcatgctcgtaaagcgatccataagatcctgaaaggtaatgacgatcgtcttctggtggtgattggcccatgctctatccacgatcctgctgccgcgaaagaatacgcagcccgtctgctcaccctgcgtgaagagctgaagtatgagctggaaatcgtgatgcgcgtctattttgaaaaaccgcgcaccaccgttggctggaaagggctgattaacgatccgcacatggataacagcttccagatcaacgacggcctgcgcattgcgcgcaagctgctgctggagattaacgacagcgggctgcctgcggccggtgagttcctggatatgattacgccccagtatctggcagacctgatgagctggggggcaattggtgcccgcactactgaatctcaggttcaccgcgagctggcgtccggtctctcttgtccggtaggcttcaaaaacggcactgacggcaccattaaggtggctatcgacgccatcaacgcagcgggcgcaccgcactgcttcctgtccgtgaccaaatggggccactccgccatcgttaacaccagcggtaacggtgactgccatatcattctgcgcggcggcaaagagccgaactacagcgcaaagcatgtggccgaagtcaaagtcgggctggaaaaagccgggctgccaccgcaggtgatgatcgatttcagccacgccaactcaagcaagcagtttaaaaagcagatggaagtgggcgcagatgtctgtcagcagattgccggcggtgagaaggcggtaattggggtgatgatcgaaagtcatctggttgaaggtaaccagaacctggaaggcagcgagccgctggtgtacggcaagagcgtgaccgatgcctgcatcggctgggacgataccgacgccatcctgcgccagctggcgaatgcggtgaaagcgcgtcgcggttaattctgacggctcaaataaaaaagcgcggacggttccgcgctttttttatggtcagcgaaaattacttcgctttaccctggttcgcaacggccgccgctttcgctgcgatttcgtccgcgttacccaggtagtagtgtttgattggcttgaagttttcgtcgaactcatacaccagcggtacgccagttgggatgttcagttcgagaatttcgtcttcacccatgttgtccaggtatttcaccagcgcacgcagggagttaccgtgagcggcgataatcacgcgttcgccgcttttcagacgtggcagaatggtttcgttccagtaaggcacaacgcggtcgatggtcagcgccaggctctcggtggttggcagctcagcgtcggtcagtttcgcgtaacgcgggtcgtggcccgggtagcgctcgtcatctttggtcagctctggtggggtgaccgcgaagccgcgacgccactgtttaacctgctcgtcaccgtatttctcagcggtttccgctttgttcaggccctgcagcgcaccgtagtgacgctcgttcagtttccaggatttctcaaccggcagccaggcctggtccagttcgtccagcacgttccacagggtatggatggcacgtttcagcacagaggtgtaagcaaaatcaaagctgaagccttcttccttcagcagtttacctgctgcttttgcttcgcttacgcctttctcggacagatcaacgtcgtaccaaccggtaaagcggttttcgttgttccactggctttcgccgtgacgcaccagaaccagcttagtaatagccatctcttactcctcaagcatttttagaatgataacaattctcattatattgccgtggccgtgccagcagcaacgcttaaccctaaccatagcgaaaatagtctctgagtgtaagatgcttgtgaatccagggttatgattttgtctgcgatcggcgctattttcagcaaggcgcacagaaaaaagccctccagagggagggctgaatattaatgtggaataaaatgatattccgtcacgctaacgtactcttcacccgggcgcagcacgcagtccggctgcggccattccggatgattcgggctgtccggcaggaactcgctctccagcgccaggccttgccagtcgctgtactcttcgtgttcgcgcgccgtcgtgccgccgagatagttacctgagtagaactgcagggcaggggcagtggtataaaccgtcatctgcagcttctcatcggtggaccagacctgtgcggcaggttgtttcacatcgcctttagcctgcagcaggaacgcgtggtcgtagcctttcaccttgcgctggtcgtcatcgctcaggaaatcctgggcgatggatttcgcgctgcggaagtcaaagctggttccgctcacgtctttgaggccctggtacggaatgcccatctcatcaaccggcagatacgcatccgccaggatctgaagcttgtggttccgcacgtcgcactggttaccgtacagattaaagtacgcgtgattggtcaggttaaccggacacggcttgtcgaccgtcgcacggtattcgatggcaatacggttgtcgtcggtcaatgtaaagcgcgcagaggcgataaggttacccgggaagccctgatcgccgtcctgcgaatccagcgagaacagcacttcgccgtcgttttgacgaacaatcttccagcggcgtttatcaaacccgtccgggccgccgtgcagctggttctcaccctggcttggaagcagggtgtactgcacgccgtcgagttcaaaacggctcttcgcgatgcggttcgcatagcgccctacggatgcgcccagataggcagactgattaacatactgctcgggcgatgcgcagccgagcagggtttcgcgcacgctgccgtccggcatcggtacgcgtgctgaaagaagggttgcaccccagtccatgagcgtaaccaccatccccgcgcgattgcgcagggttaacaggcgatacggcagaccatccggtgcgagggtaggtgtttcgtttagcactgtccggctccttgtgatgctttgcaaacatagaaggtttctttaatacctgttttcgcttcgtactgcttcgccacggcgtcctgtacggcagggacaagctcctcaggcaccagcgcaacgatgcagccgccaaaaccgccgcccgtcatgcgtacgccgcctgtgtcgccaatgaccgctttgacgatctccaccagggtgtcgatctgcggcacggtgatttcaaaatcatcgcgcatggaggcgtgtgattccgccatcagttcacccatgcgtttaaggtcacctttcgccagcgcggacgcggcttcaacggtacgggcattttccgtcagcacgtgacgaacgcgtttggcgacaatcggatccagctcgtgcgccactttgttaaattcattgagcgtgacgtcgcgcagggcgggctgctggaagaagcgggcgccggtttcgcactgctcgcggcgggtgttgtactcgctgcccaccagcgtgcgtttaaagttgctgttgacgatcacgacagccgcgccttttggcaggggaacggctttggtgcccagcgagcggcagtcgatcagcagcgcgtgttcttttttgcccagcgcggagatcagctggtccatgatgccgcagttgcagcccacgaactggttttccgcttcctggccgttcagggcgatttgcgcgccatccagcgacaaatgatagagctgctggaacacggtgcccacggcgacctccagagacgcagaggagcttaagcccgccccctgcggcacgttgccgctgatgaccaaatcggcgccgccgaagtttttattacgcttctgcagatgcttcaccacgccgcgcacgtagttagaccactgctggctgtcgtgcgtcacaatcggggcatcgagggaaaacgcgtccgtctcattaccgtaatccgccgcaatcacgcgaacctggcggtcgtcgcgcttcgcgcaactgatgaccgtctggtaatcgatggcgcacggcagcacaaagccgtcgttgtagtcggtgtgttcaccaatcaggttgacgcggccaggtgcctgaattacgtgggtggcagggtagccaaatttctcagcaaacagggattgtgttttatctttcagactcattttttagactcctgattcgcgatagtggacgtcgctaacggcacgcagacgttcagccgcctgttccgccgtcagatcacgctgggtttctgccagcatttcgtagcccaccataaatttacgcaccgtcgcagagcgcagcagcggcggatagaaatgggcgtgcagctgccagtgctgattctcttccccgttaaacggtgcgccgtgccagcccatggagtacgggaaggagcactggaacaggttgtcgtaacggctggtcagctttttcagcgccagggcaaggtcgtcgcgctgcgcgtcgctgagttcggtgatgcgctgcacgtgcgctttcggcagcagcagcgtctcaaacggccaggcggcccagtaaggcacgacggccagccagtgttcggtctccaccacggtacggctgccgtcggccagctcacgctgcgcgtaatccaccagcatcggcgagccgttttccgcgtaatacgctttttgcaggcggtcttcacgctcggcttcgttaggcaggaagctgttcgcccagacctggccgtgcgggtgcgggttagagcagcccatggccgcacctttattttcaaacacctgcacccacgggtaagtctgacccagctcggcggtttgcgcctgccaggtgttgaccacctctttcagtgcctcaacgctcagctccggcagcgttttgctgtgatcgggagagaagcagatcacgcggctggtaccgcgcgcgctttcacagcgcatcagcgggtcgtggttagcaggcgcgtccggcgtgtcggtcatcagggcggcaaaatcgttggtaaacacgaaggtgcctttgtagtccgggtttttatccccggtgacgcgcgtattgcccggacagaggaagcagtccgggtcgtgctgcggcagcgtctgttttgcaggcgtctcctgcgccccctgccaggggcgcttggcgcgatgcggagaaactaaaatccattgcccgcttaacgggttaaagcgacgatgcggatgatcgacgggattaaattgcgtcatgacggatccttagtccggatagccttgcgggtggcgtgactgccagtgccaggtatcctgtgccatttcatcaagcgtgcgcgtaacacgccagttaagctctttgtcggctttggtggcgtcggcccagtaagcaggcagatcgccctcacgacgcggtgcgaagtggtagttcaccggcttgccgcaggctttgctgaaggcgttaaccacgtccagcacgctgctgccgacgccggcgccgaggttgtaaatatgcacgcccggtttgtccgccagctgctgcatggccgcaacgtggccgtcggccagatccatcacgtggatatagtcgcgcacgccggtgccgtcttcggtcgggtagtcattgccaaaaatcgccagcgactcgcggcggcctacggcaacctgcgcgatatacggcatcaggttgttcggaatgccctgcggatcttcccccatatcgccagacggatgcgcaccgaccgggttgaagtagcgcagcagcgcgatgctccactccggctgggctttttgcagatcggtcaggatctgctccaccatcagcttgcttttgccgtacgggctctgcggcgtcccggtcgggaagctttcaacgtaagggattttaggctgatcgccgtagacggtggcggaagagctaaagatgaagtttttgacgttggccgcacgcatggcggagatgagacgcagggtgccgttgacgttgttgtcgtaatactcgagcggcttagcaacggattcaccgaccgctttcagacctgcgaagtggatcaccgcttcaatggcgtggtcgtgaaggatctcggtcatcagcgcttcgttacggatgtcgccttccacgaacgtcgggtgtttaccgccaagacgttcaatcacaggcagcacgctgcgcttactgttgcacaggttgtcgagaatgatgacgtcatggccgttttgcagcagctgcacgcaggtatgactaccgatgtaaccgctaccacctgttaccagaactcgcatatttcgctccattgggcttatggtatgtaataaccatagcataacagagacgcgaaaagtgtgacatgggataaaatagtggaatcgtttacactgtttttaaaatccgattttcagctaccgtgaggcattgtagatcaacgggatagcaatgtattagtgcaggttatctgaaaaacggagggcggtgccctccgggggttaatcgattttgctttgccgatagtaatagtgctcaccgtccggaacaaactccaggcgatgggtgatgcaggagggggcatcttcggcatgatgtgaaacgaacagcagctgcgtttcaccttcgctaatcagcacgtccacaaagcggcggataagctggcggttcaacgggtcgagtccctgcagcggttcgtcgaggatcagcagcgtagggtgtttcaccagcgcgcgaacgatcagcgccagacgctgctgcccccacgaaagactatgaaacggcgcgtcagcaacccggttgtccatgcccagaatgtccagccactgctgggccagcttgtgctgtttgtccgacaccgcctgataaatgccgatggagtcaaaatacccggagaggatcacgttgcgtaccgtggtactgacccggtaatccagatgcaggctgctgctgacgtagccgatatgttttttgatatcccagatggtttcgccgctgccgcgacgccgaccgaacagcgtgaggtcgttgctgtagccctgcggatgatcgccggtgatcaggctcagcagcgtggatttacccgcgccgttggggccgacaatctgccagtgctcacctggattgaccgtccagttgaggtgattaaggatagcgcgatcgtcataagagaccaccccatcgcgcagcacgatgcgcggctggtggggatcaagcgcgtggcgcgccgacggggcgtcgggttccggaagggtaataccgtcgagctgttcgctgtgcgcgagctgggcaatcagcgcctgcttaagcagcgcggttttttctccggtctctgtcaggttacagtcggccaggacgcccgcgtgctggataaagtccggaatttcatcaaaacggttaagcaccagcacgagggtatatccctgctgattaagcgacgccagcagagacgccagctgcgcccgggactgcacgtcaagaccgtcgaacggttcgtccagaataagcagttcaggttcgctcatcagcgcctgacaaagcagcgtttttcgcgtctcgccggtcgaaaggtatttaaagcgccggttcagcagaggggtgataccgaactgttctgccaggcgctggcagcgggtgggatccttcacttcatcctgaataatttccgccgtcgtacggccggtatcctcttcgccagggctgagcaaatcggtgttgttgcgctgccactcgtcgctgaccagcttttgcagttgttcaaacgacaggcgcgtcaggcgcgtaaagtcgctctggtattcgcccttgaggaggttgagctctccggccagcgcgcgggccagcgcggatttaccgctgccgtttgtgccgacaaacgcccagctttcacccgcgcgtagcgtcaaatcagcaattgtcagcgttcgggtatcgctaagacgaaacgtgccttgcgaaatatgcaatgatgacatggtttatccctgtttttgcagcaccagatatcagggatacgcactgtcggtacgattgtcaatgtgctcagcacaaagtggcgataatcacccggtccgcgttgaaatacgcggtgacggcagcaccttcttctaagttgtccgactcgctgagcggtacggtcgcgcaaagcggctgtccatctgccagggtcatctgcacttcgcactgcgtctggccgcgttcgatatggctgatggtgccctgcagctggttatctgctgtctttgccgcgtcgggatcgcgtgtaatactgacccacggcgccttcaggagcaccagcacctctttcccttcatccagttcaagacgttccgcgctttgcgccgttatggcggccttcagacgggtggtgccatcggcaagcaggatctcaatatgctgctgtatctgcagattgtcgcgcgctgtcaccgtaccaaaccactggttgcgggcgctggtttgtagcgagaagcgggaaatggcggccagcagactgtccagcggaacgttatcgtcatcgcttaacgcatcgaacgctttttgctgaatctgggccagcagatcgtaaagctgaataaggcgctggccataacgcgtcacgattgcaccgccgccgcctttgccgcccgtggctctgtccaccagcggctgttcgctcagggtgttcatgtcgttgatggcgtcccaggcacttttgtagctgatgcccgcgtttttcgccccctggctaatcgagcccgtttgttctatttgtttaagcagggcgatacgtcgcggatcggcgaaaagcttttgctgaagtcggagtgtgagaagaatttcggcctgcataacagtgtcctggcaaaaagggtattgtgacccaaatggtgcagggcgcaaagggtaccgcacaaaaggggatgtttttctcagttgaaagggtagaataagctgttcacaatatctggagaaaaccatgttagagttgttgaaaagtctggtattcgccgtgatcatggtaccagtagtgatggccatcatcctcggtgccatctacggcctgggtgaagtgttcaacgtcttttcgaacattggtcacagagaccaggctaaaaagcagcattgattccccccaaaacgcccggcttgcccgggcgttttgctctcaagattttcccgttttcgccgatactctttaacgcactacgccggtttacctcttcagcggtacgattaaacgctgggatctccctgacgttaccgttatattaatgtgtatataacgctactcacaggagttacagatggcacgtacatgggtacgcctttttgcaggggcaacattgacgctttcccttaccggacacgcgctggcggatgagggtaaaatcacggtctttgcggcggcgtcgctgaccaacgcgctgcaggatatcgcggcggcgtataaaaaagagaaaaacgtcgaggtggtctcctcttttgcctcttcttcgacgctcgctcgccagatagaagcgggcgcgccggcggatctgttcatctcggctgaccagaagtggatggattactcggtggagaagaaagcgattgatgcggcaacccgcgaaacgctgctggggaatagcctggttgtcgtggcgccaaaagccagcgcgcaggctgacttcaccatcaacaaagagacccactggataagtctgctgaacggcgggcgcctggcggtgggcgatccggagcacgttccggccgggatctacgccaaagaagcgctgcaaaaattgggcgcatgggagacattgtcaccgaagctggccccggcggaagatgtccgcggcgcgctggcgctggtggaacgcaacgaagccccgctgggcattgtgtatggctctgatgccgtcgccagtaagggtgtgaaagtggtggcaacgttcccggaagactcccacaagaaagtggaatatcctgttgcgattgttgatggacataaaaatgcgaccgtgacggccttccgcgattatctgaaggggccggaggcgtccgcgatctttaaacgttacggatttacgactcactgatgatattgaccgatcctgaatggcaggctgttctgctgagccttaaagtctcttccctggcggttgcgctgagtttgccctttgggatcttctttgcctggctactggttcgccgtcggtttcccggcaaagcgctgctcgacagcgtgcttcatcttccgctcgtgttgccgcccgtggtggtcggttatctgctgttaatttccatggggcgacgcggttttattggcgaaaaactttacgactggtttgggctgacgtttgcgtttagctggcgcggtgcggtgctggcggcggcggtaatgtcattcccgctgatggtgagggcgatccgcctcgcgctggaaggcgtggacatgaagctcgaacaggcggcccgtacgctgggtgccgggcgctggcgcgtttttttcaccatcacgcttcccctgacgttacccggcattattgtcgggacggtactggccttcgcccgctcgctgggcgagtttggcgcgaccatcaccttcgtctcgaacatccccggcgagacgcgaacgattccgtcggccatgtataccctgattcaaacgccgggcggagaggccgcggcggcgcggctgtgtatcatttcaatcgtattagccctggtatcgctgctggtgtcggaatggctggcgcggctgagccgcgagcggatggggaaataagcatgctggaactgaatttcacccagacgctgggaaaccataccctgacgcttaacgagacgctgcctgcaagcggtatcactgccatcttcggcgtctcgggagcgggaaaaacgtcgctgataaatgcaatcagcggcctgacgcgcccgcagtcaggacggattgtattgaataaccgcgtcttaaacgacgtggaaaacaaggtttatctcacgccggataaacgccgcattggctatgttttccaggacgcgcgcttattcccgcactacagcgtgcgcgggaacctgcgttacggcatggcaaaaagcatggccggacagtttgataagctggtgacgcttttaggcattgagccactgctcgacagactgccctcgtcgctttccggcggagaaaaacagcgcgtggccattggccgcgcgttgctgaccgcacccgaactgctgctgctcgacgaaccgctggcctcgctggatattccgcgcaaacgtgagctcctgccctacctgcagcgcctgacgcgagaaattaatattccgatgctctacgtcagccattcgctggatgagatcctccatctggccgacaaagtgctggtgctggaagagggcagcgtcaaggccttcggcaacctggaagaggtctggggcagcagcgtaatgcacccgtggttaccccgggaacagcagagcagcattctgaaggtgagcgtcctggaacaccatccgcactacgcgatgacggcgctggcgctcggcgatcagcacctgtgggtcaataagatcgacaagccgttgcagtccgcgctgcgtattcgtattcaggcatcagacgtctcgctggtgctgcagccgccgctgcaaaccagtattcgaaatattctgcgcgccaaagtcgcggagtgttttgatgataacggccaggtggaagtgaagctcgaggtgggaagccggacgctctgggcgcgcattagcccgtgggccagggatgagttagggatcaaacccggcctgtggctttacgcgcaaattaagagcgtctcgatcaccgcctgattacagcaggtgggtataaatatactgcgcgatgctgtcggtggtgttgtcgccaatcaccacgttagcgcgcgcttttaccgcgtcgtcggcattgcccatcgccacgcccgtaccgacggcttccagcatgctgatgtcgttgtagttgtcgccgaaggcgatcgcgtcctgcattgaccagccctgtgattccacatactgcgtcagacgcttgcctttgctgttgcctttgcgggcaatatccacctgatcgtgccaggaccactcgcactccagccccagcgtttcctcgacgtgcttcgcgaaggtattcagtttggtcgtgtcttcatccgtcagggcgaatttccagatagcctcaacgtcctgggctgcctgacgcagggaggatacctgggtaaagaccggacgctgcgcttcaggcagggacaacgcccagttgctggtgcgcaccacgtggccggtagggcgctcgtagaccattgcgttatccacatacatcaggccgtgaatggcgtgctcatccagcagatcaatcagttgcagcgcctggggaaccggcagcgggtcggaggctaaaaccttttttgcctgataatcatacaaataagtgccattacaacaaattgcaggtgtatctaacgccagtgcctgataaaaagggtgaatggctacgtgatgtcgacccgttacgataaggagttgatatcccgcttcctgcgcgcgtttaagcgcttcaagggaagaggggagaagggttttttgcggcgtcagtaaggtaccgtctaaatccagagcaatcacacgcgaggtcatctgttttcccgggttaatattgaatttacgttttgatgggatggtacaccgagaggcgaatgcttcaaaattcctgtcgacaattcagcattcaccgtcaaaagttaattactttcatgcgcagtgaggagtgaatattcatgaaacaaaccgtttataccgccagtcctgaaagccagcagatccacgtctggcgcttaaataccgaagggacactcacgctggttcaggttgttgatgtgccaggccaggtacagccgatggtcatcagcccggataaacgtttcttgtacgtgggtgtgcgcccggagtttcgcgtgctggcctatcgcatctctccggacgacggcgcgctgacgtacactgccgaagcgccactgccaggcagtccaacccatatctcaaccgatcgtaaaggcaactttgtcttcagcggctcgtataatgcgggctgcgtcagcgtaacgcgtctggaagatggcattccggtcgaaaccgtggatgtggtggaagggctggaaggctgccactcggcgaatatctctccggataaccgcacgctgtgggtgcctgccctgaagcaggatcgtatctgcctgttcaccctgagcgacgatggtcacctcgtggcgcagaatccagctgaagtcacgacggtagaaggcgcgggcccgcgtcatatggtcttccatccgaaccagcagtacgcctatgtggtcaacgaactgaacagctccgtggacgtatgggagctgaaagatccaaacggtcagattgagtgcgtgcagacgctggacatgatgccgtctgatttctccgacacccgctgggcggcggatattcacattacgccaaatggccgtcatctctatgcctgtgaccgcacctccagcctgatcaccgtgtttagcgtttccgaagacggcagcgtgctggcgattgaaggcttccagccgacggaaacccagccgcgcggctttaatatcgatcacagcggcaaatacctgattgcggcggggcagaaatcccaccacatcgcgctgtatgaaattaaaggcgagcaggggctgctggaagagaaagggcgctacgccgtaggccaggggccgatgtgggtggtggttaacgctcactaagtggcttaaaacaaaaaacctcgcgaatgcgaggtttttttatgcccggtggcagtgcgtttaccgggcttacataacctgtaggccgggtaaggcaaagccgccacccggcaaaaggacagcttactgcttcggctcagcaaccactttgctgcccagaccgcggttgttgtactcccacatgcggttgaagctagcgtcgttcaggttgcgctgcacgttccctttatcgtccaccgcaccggtattgccggagaacggacgtttagagatcgccgcatccgcccacggcttcgccatgttgaagccttcgttgatcacgctgtcgcggatcacaacctgaccgttggtggctgagtccacgtccagggagcgtcccagctgcgccacgccgtcaccggcagcgttaaagcggctgttcacggccaggaagccgaagaagaggttcgacggggttgccggagcaaacacgtaaccttcctgctgggtacgtgagttcaccacgcggaaatcggtgttatcaaataccaccgcgccgcggccggacaccagatccacgtcaccttcaacgtagctgttggttaccagcgtacgggtcagacggttattctgcagggtgttctgcacgccgctgttggtcacgaagaaggtgttctgacgacccagaatgttgacgttgttaatctgcaccttatcgccatcgctgcgcagcgcgacggcctggtggttaccggcgtcaacgctgtcgcccagggtattctgaatggtcaggttctgcagctgcagaccgttattctgggaccagaacaccgcagagcacatcacgccaacggtggcggaacgcttgctctggcagttatcaaacatataccacgccggtttgcccggcatatatttaccggccgggttcaccaggtgacgccaggtgttgctgtcgatttcagaatcgatcgccaggccaatttttacgtcgattgctttttcgcccagaccgtaaagcgtaatgctgcccggtgcagccggaacatacacggtgccttcatattcgcctggcaggatcgcgatgtactggcgagacgcgctgtgtttcgtgatggcagcatcaaccgcagcctgaatagaggtatgcgttacgccctgcgcacctgccgggccaaccacgaagtcaggctgtttcggcaggttaatagaagacggggtccacggcgcagcgttaggatccatcgacgagaagtagtgcgaacggtcgaagttcttcgcttcatcagcggacaaaatcgggcgggaggcggtaccgggcgcgacctgctcagaagggcgctgatccggtggggttgaactgcatgcggataaggtcacgccaaaggcgagcgctaacgccagacgggaaatcctggaaatgttcaaggtgaagctcctgggtatgcaagtctttacgggatagacgaaatagcctgcttttttatactaagttgagcgaaacgggaagataaaaagggtaaaagttgcatttttagccctggagcggcgggtaagtgatcacaaataaataacattttccgcaaagtcggttgacagcagacaacagatgaaaataaatgtctatacaacccatgacaagtggaaagcccatgcagcagattcatcctgacgatgtgatatggcgaaatgcgcgactggctacgatggcgccggacgtccgtgcgccctatggactgaaagatcaacacgccctggttatacggggtcaaactatcctggccgtgatccctgaatctgacattccggccggacacactcacggtgtcgatcttcaggatcgtctggtcaccccgggcctgattgattgccatacccacctggtgtttggcggcgatcgcgcggcggagtgggagcagcgtctgaacggtgtctcttatcaaaccatcagcgcccaggggggcggcattaacgcgaccgtgacggcgacgcgcagcagttcacccgaaaccctgcttaatctggcacagcagcggcttcagcgtctgataaatgaaggcgtcaccacggttgaaatcaaatcgggatacggcctcaacgccgaggccgaagagaaaatgctgcaggttgcacgccagctgagcctcaataatccgatcgatatcagcccaacgctgctggcggcccatgccgttccgtcggaataccgacaggatccggatgcctacctcacgctggtctgcgagaaaatattgcccacgctgtggcaaaaagagttgtttgaagctgtcgacgtgttctgtgaaaacgtcggctttaccccgtcgcaaaccgagcgcctcttcaaggcggcgaccgcgctcggtattccggtgaaagggcacgtcgagcagctgtcgaatcagggcggtgcggcattggtctgccggtataaaggacgctcagccgatcatatcgaatatgttgacgacgcaggcgttcaggcgatggcgcaaagcggcacggttgcggttctgctgcccggcgcgttctattttctgcaggagcgccagcgtccaccggttgaacagctcagaaaacacggcgtgccaatggcggtcgccaccgactataaccccggtaccagcccgtttgccagcctgcacctggcgatgaacatggcctgcgtccagtttggcctgacgcccgaggaagcctgggctggcgtcacgcgccatgccgcgcaggcgctgggccgcggggaaacccacggacagctgcgggccgggtttgtcgctgattttatcgtctgggatgctcaccatccggtagagatggtctacgagccgggacgcaatccgctgtatcaacgtattttccgtggggaggcagtatgaggttatggcggctcgtcgccgaaacggtctggcaggggcgcgacgacagcgccgaggccagcaacgcaacgcgcattttccagacgatacggcagcagggagcgttcacgccgctggcatccggcattgcgctgataggctttgaatgtgatgcaggggtaaaacgcaatcagggcaggcccggcgccgtgcaggcgcctgatgtgctgcgtaaggcgttggcaaatatggcaagccatctgggacacgagcggctggcggatatggggtcggtttacgttgaaggtgacgacctggaagcggcacagcaggcgttaagcgatgccgtgacgtcatgccagcggtccgggatgcgcacgctggtctttggcggcggacacgaaaccgcgtgggcgcacggtcgcggcgtgctggacgccttcccgaacgagcgggtggtcattatcaacctggatgcccatctcgatctgcgcaaggccgaccgggcgacgtccggcacgccgtttcgccagctggcgcactactgcgatgagcgcgggcgggcatttcagtacgcctgctttggcgtgagccgggcggcgaacacgcaggcgctgtgggatgaggctgaacgccttaacgtcacgctggtggaggatctccatttcaggcgcgatgcgctatccgcgctggaaaaggtgctggcccaggccgatcgcgtctacctgacaatcgatctggacgtcctgcccgccagcgaaatgcctgccgtttccgctccggctgcgttaggcataccggcactggatctcctccccatcatcgaacaaatctgccgtagcggtaagctacaggccgccgatctggtagagtttaacccgcagttcgatcgggacgggctgggcgcaaagcttgccgcccgtctggcctggcaaattgctcactggtgggcataacactattcaaggagtcacgatgttttcacgctcacccctgccgccgtcgagccctcccgcgcctttctacgaaaaggtgaagcaggcgatcagcgaaaaaatcgccaccggcgtctggcgtccgcacgaccgcattccctcggaggccgatctggtggcccagtttggctttagccggatgaccatcaaccgggcgctgcgcgagctgaccgacgaagggcttctggtgcgcctgcagggcgtcgggacgtttgtggcggagccgaaagggcagtccgccctgtttgaaatccgcagcattgcggacgagattgccgcgcgtaatcatcagcaccgctgtgaggtgctggtgctcgaagagacccaggccagcgccgagcaggcggtagagctgaacgtcaaagaaggcagccggatcttccactcggtgatggtgcatttcgaaaacgacattccggtgcagattgaggatcgctgcgtgaacgctgaacggataccggactatctgaaccaggattacacccagaccacgccgcacgcctatctctcgctcgtcgcaccgctgacggaaggggagcacattgtggaagccgtgcgcgccacgccgcaggagtgcgaacggctgcgcattaaagagcacgacccgtgcctgctgatccgccgtcgaacctggtcctcatcgcacatcgtgtcacatgcccggctgcttttcccggggaaccgttaccggctgcagggccactttatgtcataagttttataagcgtgatcgctaacgcaatataacaaaattgtatcttttttgttaaatctgaccttgtgtgtgcttgtctatacaagtatatctaaatgcatcatctgtcccgtataggagcacacaatgtcgtcaggtaaataccgccagcaggacgtccgcgccgcgcgcggcaccacccttactgccaaaagctggctcaccgaagccccgctgcgcatgttgatgaacaaccttgatcctgaggtggcggaaaacccccacgagctggtggtctacggcggcattggccgcgccgcgcgcaactgggaatgctatgacgccattgttaaggcactgaccgaactcgaacacgacgaaaccctgctggtgcagtccggcaagccggttggcgtgtttaaaacccacaaaaacgccccgcgggtgctcatcgccaactctaacctcgtgccgcactgggccacctgggaacacttcaacgaactcgacgcgaaagggctggcgatgtatggccagatgaccgcgggcagctggatctacatcggcagtcaggggatcgtgcagggcacctatgagaccttcgtggaggccggtcgccagcactacaacggctcgctgaaaggccgctgggtattgaccgccggtctcggcgggatgggcggcgcgcagccgctggccgccacgctggccggcgcgtgctcgctgaacattgagtgccagcagagccgcattgatttccgtctgcgtacccgttacgtcgacgaacaggccgagaatctcgatgacgcgctggcgcgcatcaaaaagtacacgtccgaaggcaaagcggtgtcgattgccctgtgcggcaacgcggcggacattcttcctgaactcgttgcccgcggcgtgcgcccggatctggtcaccgaccagaccagcgcccatgacccgctgcacggctacctgccaaaaggctggtcgtgggaagactatcagcaaaaagcggagaccgacccggaaggcacggtgcttgccgcgaaacgcgccatggcggaacacgtctccgcgatgctggccttcagccagatgggcattccgacctttgactacggcaacaacatccgccagatggcgaaagagatgggcgtgagtaacgccttcgacttcccgggcttcgtcccggcctatatccgcccgctgttctgccgcggcatcggtccgttccgctgggttgccctgtccggcgacccggaggacatctacaagaccgacgccaaagtgaaggagatcgtcgccgatgacgaacacctgcatcgctggctggacatggcccgcgagcgcattaacttccagggcctgccggcgcgtatctgctgggtagggctggagtggcgtcaaaaactgggcctcgcctttaacgaaatggtgcgcagcggtgaagtttccgcgccgatcgtcatcggccgcgaccacctggactccggctccgtcgccagcccgaaccgcgaaaccgaagccatgcgcgacggctcggacgcggtctccgactggccattgctgaacgccctgctcaacaccgccagcggcgcgacctgggtgtcgctgcaccacggcggcggcgtgggaatgggcttctcccagcattccgggatggtcatcgtctgcgacggtaccgatgaagccgccgcgcgtatcgcccgcgtgctccacaacgacccggccaccggcgtgatgcgtcacgcggatgcgggttacgagattgccattgactgtgccaaagagcagggacttaacctgccgatgatccctgccacacaaggaaagcatgaatgagcgcgttaacactcactcccggctcactgacgctcaagcagctgcgtaacgtctggcgtcagccggtcaccctgtcgcttgatgaaagcgcccacgccgccattaacgacagcgtggcctgcgttgaagccatcgttgccgaagggcgcacggcttacgggattaataccggctttgggctgctggcgcagacccgcatcgcgacgcacgatctggaaaacctgcagcgttcgctggtgctgtcgcacgcggcgggcgtcggtcagccgctggacgatgagattgtccgtctgatgatggtgctcaaaatcaacagcctggcgcgcggtttctcgggcattcgcctgagcgtcatccaggcgctgatggcgctggtgaatgcagaggtctacccgtggatcccggcgaagggctccgtcggtgcctccggcgatctcgcgccgctggcgcacatgtcgctgctgctgctgggcgaaggcaaagcgcgctggcagggcgagtggctgcctgcgaaagaggcgctgaaaaaagccgggttaaacccgatcaccctggcggcgaaagaagggctggcgttgctgaacggtacccaggcatcgaccgctttcgcgctgcgcggcctgtttgaagcggaagatctgtttgcctcggcggtggtgtgcggtgcgctgaccaccgaagcggtgctgggctcgcgtcgcccgttcgatgcccgcatccacgaggtgcgcggtcagcgcgggcagattgatgccgccgcgatgtaccgtcacgtgcttaccgacaccagcgagatcgcggagtcacaccacaactgtgagaaggtgcaggatccgtattccctgcgctgccagccgcaggtgatgggggcgtgtctgacgcagctgcgccaggcggcggaggtgctgctggtggaggccaacgcggtgtccgataacccgctggtgttcgcccaggaaaacgaggtggtctccgggggcaacttccacgccgagcctgtggcaatggcggcggataatatcgcgctggcgattgccgaagtcggcgcgttgtccgagcgccgcatcgcgctgatgatggataaacacatgtcccagctgccaccgttcctggtgcgtaacggcggggtcaactcgggctttatgattgctcaggtaacggccgcagcgctggcaagcgagaacaaggcgctgtcgcacccgcacagcgtggacagcctgccaacctcggccaatcaggaagatcacgtttcgatggcaccggctgccgggcgtcgtctctgggaaatggcctccaacacccgcggcgtgctggcgttggaatggctggcggcaagtcagggtatcgatctgcgtgaagggcttaaatccagcccgctgctggagcaggcgcgtcatgcgctgcgcgagcacgttacgcattacgatgatgaccgcttctttgccccggatattgataaggcgatgcagcttctggaagaagggcggctggtggggctgttaccttcggtgctgtgatttttttgcccggtggcgctgcgcttaccgggcctacgagtgcgaaatccaggccgggtaaggcgtagccgccacccggctttttttacgaatacatcgccgtaatcgacgcgctccccagggaatggaaatgcacgttaaacccgaccatcgcgccgctcgcgccttcatcgacctcaattctctccacgtccagcgcgtgcaccgtgaagatatagcggtgggtttccccttttggcggcgccgcgccgccgtagcccgctttaccaaagtcagtacgcgtctgaatggcaccttcaggcagggcaaccaggtctgaaccggaaccctgcggcagcacgcgcgtgtcggcaggcaggtttgccacgatccagtgccaccatccggaaccggttggcgcatccgggtcatagcaagtcacgacaaagcttttggtgcctgccggaacctcgtcccacgccaggtgcggggagatgttatcgccctgataccccatgccgttgaaaacgtgccgttccggcagcttttcgccgtcgcgcagatctttactgatgattttcatacggtttaccctcgttgatcgctcgttcagcaagtgtaatgcattgggttaaatcgtgaaatgcgcgggaatgttaacggctgttacaaccgcgtcggttaattttcgaagctgctctggcgtgatgctgtacggcggcatcagatagataagcttgccaaaaggccggacccacacgccctggtccacgaagaagcgctgcagcgccgccatattcaccggatgggtggtttcaatcaccccgatggcgcccagcacgcgcacgtccgccacgaaattcgcgcccgaggcggcgctcagctccgatttcagctgcgcttctatcgccgcaacctgcgtctgccactcgccgctctccagaatcgcaaggctttcactcgccacggcgcaggccagcgggttacccataaacgtcgggccgtgcataaagcagccggcttcaccgtcgctgatggtgtcggccacctggcgggtcgtgagcgtggcggagagcgtcatggtgccgccggtcaacgctttaccgaggcacagaatatccggcgcaatgcccgcatgttcgcaggcaaacagcttgccggtgcggccaaagccggtggcaatctcatcggcaatcagcagaatgccctcgcggtcgcacatcctgcgaatacgcctcagccattccgggtggtacatccgcatcccgcccgcgccctgcacgatcggctcaagaatgacggcggcgatctcatggcgatgcgccgccatcagccgcgcgaagccgaccatgtccatctcgttccactcgccgtcgaagcggctctgaggcgccggggcgaacaggttttccggcagataccccttccacaggctgtgcatggagttgtccggatcgcacaccgacatcgctccgaaggtatccccgtgatagccgttgcggaaggtgaggaaacgctggcgcgcttcgcctttggcgtgccagtactgcagcgccattttcatcgccacttccaccgccacggagccggaatccgccaggaacacgcactccagcgagtcaggcgtcatcgccaccagacggcggcataaatccaccgcgggctgatgggtgatcccgccaaacatcacgtgcgacatctggtcaatctgcgtcttcatcgccgcgttcaggcgcgggtggttgtacccgtgaatggccgcccaccaggaggacatcccgtcaacgagccgctcgccgctggcgaggtgcagctcgcagccgtgggcggaggccaccggatagacgggaagggggcgggtggtggaggtgtaagggtgccagatatgctgcttgtcgaaggcgagatcgtcctgggtcataatcgacttgtaaaccattttgaaaagttttaggtttacgagtataaaccgaaccgaaaattaacaaaaccctttggagaagcccgatggctcaccacgcacgctggacgatgtcgcaagttactgaattattcaacaaacctttccttgagctgatgttcgaagcccaacaggtgcatcgtcagcacttcgatccccgccatgttcaggtcagcacgctgctgtcgatcaagaccggcgcctgccccgaagactgcaaatattgcccgcagagcgcgcgctacaaaaccggcctggagtcagaacgcctgatggaggtcgagcaggtcctcgactccgcgcgcaaggccaaaaacgccggttcaacccgcttctgcatgggcgcggcgtggaagaacccgcacgatcgcgacatgccgtacctggagcagatggtgaagggcgtgaaggagatgggcctcgaagcctgcatgaccctcggcacgctcaacgaggagcaggcgcagcgcctctcggcggcggggctggattactacaaccacaacctcgacacctcgccggaattttacggcaacatcatcaccacgcgtacctaccaggagcgtctggatacgctggataaggtgcgtgacgcggggatcaaggtctgctccggcggcatcgtgggcttaggcgagacggtgaaagaccgcgcgggcctcctgcagcagctggcgaacctgccgaccccgccggaaagcgtgccgatcaacatgctggtgaaggttaagggcacgccgctggcggataacgaggacgtggatgcgtttgattttatccgcaccatcgcggtggcacgcatcatgatgccgacctcgtacgttcgcctctctgcgggccgcgagcagatgaacgagcagacccaggcgatgtgctttatggccggcgccaactccatcttctacggctgcaagctgctgaccacgccgaacccggaagaggacaaagacgtccagctgttccgcaagctggggctgaacccgcaccagaccgaggtgctgacgggcgataacgagcaacagcagcagctggagcagcagattttcaacgccgacaccgaccagttctacaacgcggcagccgtatgacctggcaggcacggatcaactctgcgctcgacgagcgtcgggcggcagaggcatttcgcgttcgcagggtggtggaaaacggcgcgggccgttttcttacccgtgaaggccagcagttctgcaatttctccagcaacgactatctcgggctgagccagcatccggccattatccgcgcctggcagcagggcgcggagcggtttggcgtgggcagcggcggatcgggacacgtcagcggatacaccacggcgcatcaggcgctggaagaggcgcttgccgactggctgggctacccgcgcgcgctgctgtttatctctgggtttgccgccaaccaggcggtcatcacggccctgatgggcaaggacgatcgcattgtcgccgatcgcttaagccacgcctccctgctggaggcggcaaatttaagcccggcgcagctgcggcgttttgcccataacgatgcggggcagcttgctgcgctgctggataaaccctgcgacggacaacagctggcggtcacggaaggggtgttcagcatggacggcgacagcgcgccgcttgccgcgctgcacgaggccgcaaagcggcaaaacgcctggctgctggtggacgatgcccacggcactggcgtgatgggcgacgaagggcgcgggagcgcgtatcagcaaaacgtgaagccggagctgctgattgtcaccttcggcaaaggctttggcgtcagcggcgccgccgtgctgtgcagcgaacccgtcgccgactatctgctgcagtttgcccgccacctgatttacagcaccagcatgcctccggcgcaggccgtagcgctgtcagcgtcgctggcggtgatacgcagcgcagaaggagatgagcgtcgccagcggctggcagagcatattgcgcgcttccgtcagggactcgcggcgctgcctttccacagtcccgattcgcagagcgctatccagccggtgattgtcggtgaaaatgcccgcgcgctggcactggcacaggcgctgcgccagcggggcatgtgggtcacggccatccgcccgcccaccgtcccaccgggcacggcgcggctgcgcttaaccctgacggcggcgcatgaagcacaggatattgagacgttgctggaggcgctccatgatgccggtgaataagcaggccatcgcggcggcattcggccgcgccgcgcagagctattcgcagcatgatgagctgcagcgtctgagcgcgcaggggcttctggccgcccttggcgagacctcgtttgcgcaagtgctggacgccggctgtggtcccggcagcaacagccgctactggcgcggggcgggaagccaggtgacggctatcgatctctcagcccggatgctggaagaggcacgccagcggcaggcggcagatcgttatctgctggccgatatcgaggcgatcccgctggcggacgcgcagttcgatctggtctggagccatctggcggttcagtggtgcagtagcctgccgcaggccctgcgcgagctttatcgcgtggcgcggccgggcgggaaggtggcctttaccaccctgctggaaagttcgctgccggagctgaatcaggcctggcgggcagtcgatgaacagccgcacgctaaccggtttttatcgcatgagcaggtgacgcaggcgctggcaggctggcgctatcgcagcacggtgcagaccatcacgctcaattttagcgatgcgttcagcgccatgcgttcgctgaagggcatcggcgccacgcacctgcataccggacgcgagaaaaaaccgcttacccggggtcagctgcagcgccttgagctggcctggccgcagcagcgggggcatttcccgctctcctatcaactttttcatggggttatcgaacgtgactgaacgttattttgtcaccggcacggacacagaagtgggcaaaacggttgccagcacggcattgctgcaggcggcacggctgctcgggaaaaacaccgccgggtataagcccgtggcgtccggcagcgagatgacggcggaagggttacgcaacaccgacgcgctggcgctccagcgtaacagcacgcgtgaactcgcctattctgcagtgaatccgtacacctttgccgaaccgacctcgccgcacattgtcagcgccgatgaaggccgtccgattgatttcgccgtgctgtctgccggactgcggacgctggaaaatcaggccgactgggtgctggtggaaggggccggcggctggtttacgccgctttcagacacgcagacgtttgctgactgggtgcaggccgagcagcttccggtcattcttgtcgtcggcgtcaagctgggctgcatcaatcacgccatgttgaccgcacaggccgtccagcaggccgggctgcgtcttgcgggctggatagccaacgacgtggttgcgccgggtaaacgccatcaggcgtatctggcgacgctcaggcgcgtcctgcccgcgccgtgcctcggggagctcccctggctggctgacggcgcggaaaatgccgaaaccggacgttatctcgatctcagcgttttgcttcccgcgacatccagtgagcgataagctcgtcatccagttcgttaacgtggccctgcgccacgttacgcccgcgatagagcagacagaaacggtccgccacccggcggataaacgacagctgctgctccgctaacagcaccgtcatacccagctcccggtttaagcgccccagcagctgcaccagcttctgggcaacgctgtgccccgcgccgtgcagcggttcatccaggatcagcaggtgagggcggttcaccagcgcattagccagcgccagctgatactggtcgtccggagagagcgtgttggcgcgggttcgtcgcaaggcatagagcgccgggaacaggtcgtaaacgtcatttttcgcctccgggttcggtttccccgtcgcccgcatggcgatatgcaggttctcctcaatcgtgagctgggagaagatccgcctgtcctgcgagacatagcctatccccggcccggaacgctgttctggcggcgggttgagcaaatcgcgcggcggcgcgcccgcctcataccagatgatgctgccgctttcgacgggcactttcccggcgatgcaattcatgagggtggtttttcccatccccggcaggccaacgacgcctgtacacatcccttgcggaaaatctaaatccacattccatagcgtatgttgacttccgtaaaactgattcactgcacgcaggctcaacatctttctctccttaaaaatgtgtgtaggtgtggctcgttgttaaactgcaaaacccctgccataaagcggaaagtgattaaaaaagcgtcttttttaggaataagtcacagaagcgcgggggataaaaagggggattgcacatcgacggtgccgacggtggtgagttgtggtgcagagccagaaatgatggaaatgtgagcaagatctcgtcagttggttatgaatgacgcgactgttaatcagcaaaaaagagctataaaaattttttgctgccgcctcgtgggaaaatccgggaatttgcagagcgccagtctgtatgggctggaagcagttatccactattcctgtggataaccatgtgcattagagttagaaaacacgcgataagcgagagaagacgcggcttacgcccaaattgacgcgaaacgcggctttagaaaatatcgtttattttttaattggttagataaaatcaattcccgtcatgaaagtgtcacccgttgccataaaactatcattacctggcttgacaaatgttaaaaaagaaaaagttctggggataacctgacctgactggtgttttatgttgccactgtccaaattttggccgctatcgcgctaatcattcaggcgctatgctaaatatcctgacatgctactggtttttcatccagtgttttttactggcattcctggcaacaaggagtaaaattattcacctgccgcttataacgtcatcaggttgtcgcccatgagtaaaccgttcaaattgaattctgctttccgtccgtctggcgatcagcctgaagcgatccgtcgtctggaagaggggctggaagatgggctggcgcaccagacgctgctcggggttaccggctcgggtaaaacctttaccattgccaacgtgattgcggatctccagcgccctacgatggtgctggcgcccaacaaaaccctggcggcgcagctttacggcgagatgaaagagttcttcccggaaaacgccgttgagtatttcgtctcctactacgattactaccagccagaagcctatgtgccgagctctgataccttcatcgagaaagatgcgtcggtgaacgagcacattgagcagatgcgactgtcggccactaaggcgctgctggagcgtcgcgatgtggttgtggtggcctctgtttcggcgatttacggcctgggcgatccggatctctatctcaagatgatgctgcacctgacgcaagggatgatcatcgaccagcgcgcgattttgcgccgcctggcggagctgcagtacacccgcaacgaccaggccttccagcgtggtacgttccgcgtgcgcggcgaagtgatcgacatcttcccggcggaatcggacgatatggcgctgcgcgttgagctgtttgacgaggaggtcgaacgcctgtcgctcttcgacccgctgacaggacacgttgagtcggtgatccagcgcttcaccatctacccgaaaacgcactacgtgacgccgcgcgagcgtatcgtgcaggcgatggaagagatcaaagtggagctggccgagcgccgcaaagtgctgctggcgaacaataagctgctggaagagcagcgcctcagccagcgtactcagttcgacctggagatgatgaacgagctgggctactgctccggcatcgaaaactactcccgcttcctctccgggcgcgggccgggcgagccgccgccgacgctgtttgattacctgccagcagacggtttgctggtgatcgacgaatcccacgtcacgatcccgcagatcggcggaatgtaccgcggcgaccgggcgcgtaaagaaacgctggtggagtacggattccgcctgccgtcagcgctggataaccgtccgatgaagtttgaagagtttgaggcgctggcgccgcaaaccatctacgtctctgccacgccgggcaactacgagctggaaaaatcgggcgatgaggtggttgaccaggtagtgcgtccgaccgggctgctggacccgattatcgaggtgcgtccggtggcgacgcaggtagacgacctgctctctgagatccgcgcccgttccgccattaacgagcgcgtgctggtgaccacgctcaccaagcgtatggcggaagacctgaccgagtatctcgaagagcacggcgagaaggtgcgttatctgcactcggatatcgataccgtggagcgcatggagattatccgcgacctgcgtctgggcgagtttgacgtgctggtggggattaacctgctgcgggaaggtctggatatgccggaagtctcgctggtggcgattctggacgcggataaagagggcttcctgcgttccgagcgttcgctgattcagaccatcggccgcgccgcgcgtaacgtcaacggtaaagcgattctgtacggtgacaaaattaccccgtcgatggcgaaagcgatcggtgagacggagcgccgccgcgagaagcagcagcgctacaacgaagagcacggcattatcccgcaggggctgaacaagaaggtggtggatattctggcgctgggccagaacattgccaaaaccaaagcgaaaggccgcggcaaggcgcgttcagtggtggaagaagataccgtcgtgctgacgccgaaggcgctgcagcagaagatccacgagctggaagggcagatgatgcagcacgcgcagaacctggagttcgaagaggcggcgcagatccgcgaccagcttcatcagctgcgggatctgtttatcgcggcatcgtgagttttttgcccggtggcgctgcgcttaccgggcctacaggtttagcgtcttttgtcaccccggtaagcgcagcgccaccggggtttttgttaacccaacgcctgaatcgctttctccagcgcctcgcgcagcaggtggcggtcgtgacgatatttaatatcgctggcttccagcggctcctgcaccaccacgcgatcgccaatccctgtcacatccacttttggcccaaccacgacaccgtcgataattttcttaccgacgtactgctccatcaggtcgagcttgtccgccagcgacaggctcgccgcagccggactcagctcacgccctaaattgccgatgtagaccatcggcgccggggtgcggcgcagcgcctgcgccagctctttcaccagcaggatcggcatcaggctggtgtaaaagctgcccgggccgatcagaattaaatccgcatcgccaattgcttctacggcttcacgcgtcgccggcacgctcgggtaagtcatcagctctttgggcggcagtagaagctggtcaatgttcacttcgccgtatacttcatgcccttcggcgtcgatggccatcaaatcgaccggttgttcagacatcgggatcagaaatgcgtccactttgagcaggttacggatcagattgatggcttcaagaggccttacgctcaggtgatccagcgcctttaacatcagatttccgaggttatgcccggaaagttcgccattgccgccaaaacggtactcaaacatcgccgatgcgacgctcggctcggtaattaactggttcaggcagttgcgcatatcgccccaggcaataccgccttcggcacgtctgatccgcccggttgagccgccgttatcggtggtggtcactatccctgtcagccttgagccgagtgacgacaaagaggacataacgcggcccaggccgtggcctccgccaagagcgaccactcggtcaagatccgcaaaagtgcgattgcgcatacgtattccttatcacgttcgatcgcgtaacagtaacctaactacccctaaaagacgatgcctcacccgaagcaaaatgacgtatatcaatgtgaaagtgcagtttttaggtattctgtagcgaaaatgcaggattgattcgctatatacgtaattatatagcgaaaagcgataatggcgctgtcagactttccgcgctactatcgccttaaccacgttttcaacactgaaaacatacactctagcccttgtgcctgtgtcgaaagatatggcgctctggccgtggcgaatttgccaccagggtacagaaagaaatgactgtgcctcccgtatctggaaaggtgtacatggcttcacaacttactgatgctttcgcgcgtaagttttattacttgcgtctgtcgattaccgatgtgtgcaacttccgttgcacctactgcctgcccgacggctacaaaccgggcagcgtcaccaataacggctttctctccgtggatgaagtgcgccgcgtcacgcgcgccttctctgagctcggcaccgaaaaagtgcgtctgaccggcggtgaaccctctctgcgccgtgatttcccggacatcattgctgccgtgcgtgaaaacgaccgcattcgccagattgccgtgaccaccaacggttaccgcatggcgcgcgacgtggccacctggcgcgatgcgggcttaaccgccattaacgtcagcgtggacagtctcgacgcccgccagtttcacgccattaccggccaggataaattccgccaggtgatggacggcatcgacgcggcgttcagcgccgggttcgagaaggtcaaagtcaatacggtgctgatgcgcgacgtcaaccaccatcagctggacaccttcctcgcctggatcaaatcccgccccattcagctgcgctttattgagctgatggaaaccggcgagggcagcgagctgttccgtcgtcatcacatctccggcatggtcctgcgcgacgcgctgctgaaacgcggctggatccaccagatccgccagcgcagcgacggcccggcgcaggtcttctgccatcctgattacgaaggcgaaattgggcttatcatgccttacgagaaagacttctgcgccagctgcaaccgcctgcgcgtctcttccgtcggcaagctgcacctgtgcctgttcggggacggcggcgtagacctgcgcgatctgctggcagacgatgcccagcaggaggcgcttgaagcacgcatttctgaagcgctgacgcataaaaaacagacccacttcctgcatcagggcaataccggcattactcagaacctgtcttacatcggcgggtaatcaggcttaagaaggaatcagaagatgagtcaggtaagcgcagaatttatcccgacacgcattgctatccttaccgtttccgaccgccgtggcgaagaggatgatacctccggccactggctgcgcgaggcggcccatgacgcggggcatcacatcgtcgataaagcgatcgtgaaggagaaccgctacgccattcgcgcgcaggtctctcagtggatcgccagcgatgaggtgcaggtggtgctgatcaccggcggcaccggctttaccgcgggcgatcaggcgcctgaagcgctgctcccgctgttcgaccgcgaggtggaaggcttcggcgaggtgttccgcatgctctcctttgaagagattggcacctccacgctgcagtcgcgcgccgttgccggggtggcgaacaacaccctgatttttgccatgccgggctcgaccaaagcctgccgcaccgcgtgggaaaacatcatcgccccgcagctggatgctcgtacccgtccgtgtaatttccatccccatttaaagaaataagctatgtcacaactgacccacattaacgccgctggcgaagcgcatatggtggacgtctccgccaaagtggaaacggtgcgcgaggcgcgcgccgaagcgtttgtcaccatgctgccggaaacgctggcgatgatcatcgacggcagccatcacaagggtgatgtctttgccaccgcccgcatcgccggtattcaggccgccaagcgcacctgggacttaattccgctgtgccatccgctgatgctgagcaaggtggaggtaaacctgcaggcgcagccggagcagagccgcgtgcgcattgaatcgctgtgccgcttaaccggcaaaaccggcgtggagatggaggcgctgacggcagcgtccgtggccgcgctgaccatctacgacatgtgcaaagcggtgcagaaagacatggtgattggcccggttcgcctgctggcaaaaagcggcggcaaatccggagattttaaggtggacagccatgattaaggtgctcttttttgcgcaggtgcgcgagctggtgaataccgacagcctgacgctggatgcgtcttttgaaaacgttgcggctctgcgtgcgcatctggcggcacagagcgagcgctgggcgctggcgctcgacgaaggcaagctgctggccgccgttaaccagacgctggtggagcttacccatccgctgaaggccggggatgaagtggccttcttcccgccggtcacagggggctaatatgactgaaacccgcattctggttggccctgagcgctttaacgtagggacggaatacagctggctggcggaacgcgacgaagacggtgcggtcgtgacctttaccggcaaagtgcgcaatcacaacctcggtgacagcgtgaaggcgctgacgctggagcactatcccggcatgacggagaaatcgctggcggagatagtggacgaggcgcgaggccgctggccgctcggacgcgtcacggtgattcaccgcatcggcgagatgtggcccggcgaggagattgtctttgtcggggtgaccagcgcgcaccgcggcagcgcgtttgcggcaggggagttcattatggattacctcaaaaccaaagcgccgttctggaagcgcgaagccacgccggaaggcgatcgctgggtagaatctcgcgacagcgataaacaggccgccagccgttggtagtcggtttacgtggatgtgttactcttaatgagtgtgtctacttaatcttaatcaggagtgaatcatggaccgatttccgcgttccgattcaatagtgcagcagacccgtagcggcctgcagacgtatatggcgcaggtgtacggctggatgacggttggcctgctgcttaccgcgtttatcgcgtggtatgcggcgaatacgccggagctgatgatgtttatcttctccagcaaaatcaccttctttgggctgattatcgcgcagctggcgctggtatttgtgctttcgggtctggtgcacaagctaagtgccggcatggcaacgaccctgtttatgctctattcggcgctaacggggctgacgctttccagcatctttatcgtttacacctactcatccatcgccagcaccttcgtggtcaccggcgggatgtttggtgcgatgagcctgtacggctacaccacgaagcgcgatctgagcggtttcggcagcatgctgtttatggggctgatcgggattgtgctggcgtcactggtgaacctgtggctgaagagcgacgcgctgatgtgggcagtgacctacatcggggtggtgatcttcgttgggttgacggcgtatgacacccagaagctgaaaaacatcggcgagcagattgacgtgcgcgacagttcgaacctgcgcaaatactcgattttgggcgcgctgacgctctatctggacttcatcaacctgttcctgatgctgctgcggattttaggcaaccgtcgctaaggttgctttgccgggtggcggcttcgccttgcccgtcctgcgaagcgcgaaccgtaggtcgggtaaggcgaagccgccacccgacttattcacttcgctagcatcctctcattcttcgcccgcagctttttcgcccgactttccagcaccagatagcagatcgttgccagcgccagcggcaggaagtaatacagcatgcggtacgccagcagggcggcgataatcgttccctgagagacatgctcccccgcaagcaacgcaataaagaccgcctcgagcacgccgatccccgccggaatgtgcacaatcaccccggcaatgctgctcaccagcagcatgcccagcacgaagaagtaattgacgtcctcgccaatcagcagccagatgatggcccccatggccatccagttggcgctggagaccgccatctgcagcaccgcaaacttccacgagggcaggaccagcttttgccctttaatcgtcatatggcggcgctttgcaaacgcgcaggcccacagataaacggcgataatcagcagcagcacgatgcccagaatgcgcagcgtggcctcgtcgatataccagtgcgcgggcagctgcaccacgccgatggtaaagatcaccccgccgagcaggatatagcccagccagttggtggtaatgctcagggaaaaaatgcgtgtgatggtcccgcccggcaggccgagccgcgagtagaggcgatagcgcatgccaatgcccccgacccaggtgctcagcgtcaggttaaaggcgtagcagataaacgacaccagcatcacctgacgtttggccagcttgtggccgcagtaggcccgacccagcagatcatagcagccgtacatcaggtagctcacgataaccagccccgtcgcgcccagcagcaccatccggttatagttgcggatgaccttccacacctcttcccagtccactttctgcgcgtagaccaccagcagcaccgcgacggcaataaagaatacccaggtgaggatcttttttgccagacgccagcgtggatgcgattttgacatcagggtttgcctccgtcttccgcttctatgcggtcctgggtttccatttcgggttgtaccggcgggtccacctgcgccagcttcggcgtatgcgccggcagccagccgaccatcgccgggaaatgccgcaggaagtggaacaccaccacgctgatgcccaggttccaccaggtgcgtttgggaaccatagactcatccacgcgcacgcagtcgttaacgatcaacgcctgcaggttatcccgcagggtctggttaaactggcggtcgtgaatgatcaggttggcttcaaggttaagcgacaggctcagcggatcgaggttgctggagcccacggtggcccagtgatcgtccatcagcgcgactttgccgtgcagcggccgacggcggtattcgtagatctggacgccgcccttcaccaggtagttgtacagcagccgcgccccgactttgacgatcggcatatccggctcgccctggacaatcagcttcacgcgcacgccgcgtcttgcagcatttcgcatggcatgcagcaggcgatagcccgggaaaaagtaggcgttggcgatgatcacttcgcgcttggcgttggccagcatcttgagatagtgacgttcaatgtcgtcccggtgctcgccgttgtcgcgccagacgaaaagcgcctgcgcttcgccgggcttccggttctcttccgggcgatggcggcgtcgccaccagcggcgaacggcctctttccccggcaggttctccagctcaaacagcaagatgtcctgcaccaccgggccttcaatgcgaatggcgtaatcctgcttcgcttccgggccgtagtcggacatatgttccgccgagtagttaatgccgccgacaaacgctaccgtctcatccaccaccacaattttgcggtgcatacggcggaaaaggttggtccgcatgccgaacaggcgagggccgggatcgtagtagcggaataccacgcctgcggcggtcagttcattgacgaacgcatcgctgaggtccggcgagccgtagccatccagcagtacttcaattttgacgccgcgctgtgcggcgcgcaggagcacgctgtgcagctgcttgccgacgttgtcttcgaaccagataaaggtttcgaggatcactttctgctgggcgttatcaattgccttaaacacggccgggtaatactcgtccccgttgaccagcagcgtaatccggttgccttcctgccaggaacatttcataagtggatctccgcgctgagcggggcatggtcggaaagatgccgccagttgagaagcgccagggcggtcgggctgctggcgtgggcatttttcacgtagatgcggtcaagccgcagcagcgggaaacggaccgggaacgtgcgcgcaggcctgccgttcgcccgggtgaagatctcctccagcccggcatccaccttcaacggatggtttgcccgctggcgccagtcgttgaaatcgcctgccacgacaacaggttcaccgtcaggcagcgcgttggcccattcggccagcattttcagctgcgcctgacgatgggcttcgcgcaggcccagatgaacgcagccgacgtggatgggcagctcaaggtcgggcggggtaatgcggcagtagagcaggccgcgtttttcgctctccccgacggaaacgtcgcggttttcataatgttcaatgggataacgcgacagcaccgcgttgccgtgatgaccttcaggatagaccgcgttgcggccgtaggcgtaatcgctccacatggtgtcggccagaaattcatagtgcggcgtgtcgggccagttctcaaagtgaagcggatgtacttcgtgtgcgcccatcacctcctgcaggcagacaatatccgcgctgacggtgcgcaccgcgtcgcgcagctccggtaaaatgaagcggcggttaaatgctgtgaagcccttatgaatgtttatcgtcagcactttaagcgagaaatgctgcatttttttcgtcataagctccttcctgagtgactatcccgatgaaaataaagtgtagtcgtcgtcacaaaaagatgcggcgttacggaattttccgtaaagtgcggtagtctgattaagcagagaaaaatccttcaggagagaagccatgaagtggcaacaacgtgttcgtgtcgcaactggcctgagttgctggcagataatgttgcatttactggtcgtggccgtactggtgatgggctggatgagcggcacgctggtacgtgttggcctggggctatgcgtcctttacggcgtcaccgtgctgtcgatgctgtttttacagcgccaccatgacgcgcgctggcgcgaggtgggtgacgtgctcgaagagctcaccaccacctggtactttggtgcggcgatgattgttctgtggctgctgtcacgtgtgctgcaaaacaacctgctgctggccctggcgggtctggccatcctcgcagggcctgcggtggtctcgttgctgaccaaagagaaaaagctacgcgatgttgcgtctaaacatcgcataggccactgagcctgtcgtggccgcgatgaccagtagcggccacaaacttccccagacaatatccagactcgcatccttcagatagatttgcttggtgatatccgtaaagtgccttatcgggtttatccacgtcagatcctggagccacaccggcatattctcaaccggcgagacgtacccggagagcaggatcgcgggcatcataaagacgaataccccgataaacgcctgctgctgcgtcgagcagagtgcggagatcagcagcccaaaccccaccagcgacagcccgtaaatcaccatcgtgaagtaaaacagcgccagcgatccggcgaacgggatctggtaggcccaaattcccacccccagcacgatggtggcctggaaggtggcgacaattagcgccggcaccgctttgccgacgaaaatttgccaggtggcgagcggggagaccagcagctgatccagcgtgccctgttcgcgctcgcgggcgacggagagagaggtcacaatcatcaccccgatggtggtgatcatggcgatcagcgacggcaccacaaaccacttgtagtccagattcgggttataccagttgcgcaccaccagttcgctgttgttgggcttcggtttgccgtccatcagctcctgctggtaatccttcaccacctgctggaggtagttggctgcgatctgggcgctgttggagttacgcccgtcgaggatcagctgcatcggcgcggtctggaaggtatccagattgcgggagaaatccgccgggaagcgcaccagcagcagcgctttttgcgtgtcgatggtaggctggatctcctgcggacttttcagcagcaggatgtgggtaaaggccttcgcacgcgcaaagcgctgcgtcagctcgacggaatgtttgccgttgtcttcgttgtaaatggcaatggtggcgttggtcacctcaagggtggcggcaaacgggaacagtaaaacctggatcagcaccggcaacaccagaatggcgcgggtttgcggctcgcgcagcagggattgcagctctttgcgtattaacgtccataaacggtgaaacatgcgcgctccttaatctaaccgccgtttggttttcatccacgtcaacccgataaacatcaccgccgacgccattaaaaacagcgtgttgataatcagcactaccggaatattccccgccaggaacaggctttgcagggtgctcacgaagtagcgcgccgggataatgtaggtcacggcgcggatgacggcaggcatgctgtctatctggaagataaacccggacagcataatcgacggcaggaaagcggcgttcagcgccacctgcgcggcgttaaactggttgcgggtgatggtggagatgagcagtcccatccccagcgtgctgagtaagaacaggctggtgataaagaacagcaccaccagcgagccgcgatacggcacgccgaggataaagacggacaccagcatgcagagcagcatcgccagcatgccgaggaagtagtagggaataagcttgcacagcagcagctcgacgcgcgtcacttcggttgaaagcagcgcctccatggtgccgcgctcccactcgcgggcgataaccagcgaggtcagaatcgcgccgatcaccgtcataataatcgtcaccgcgcccggaataataaagtgctggctgatggcggcggggttaaaccagtagcgcgtctgcacgtcgatgagcggcttaaattcttcaccccggtcttcggcgcgctgcatctgccagagttgccagatcccctccgcgtagccctgcacgaagttcgcggtgttcggctcgctgccgtctgtaatcacctggatcggcgcatcggtattcgcccgcgccatattggcggcaaaatccaccggaatgacgatcagaccgcgaattttcccggcctgcatcttctggatcagctcctggcggttgtcgctgatggtggcatcaatgtagggcgaaccggtcatggcgtgggtaaagtccagcgcctcttcgctctgctgttcgagtaaaatcccgacccgcagcttgctggagtccaggttaatgccgtagccaaagataaacagcagcagcagggggatcaccaccgcaatcagccagctgctgggatcgcgcacgatctgccgcgtctctttaacgcacagcgcgcgcacccggcgccaggaaagggcgttactgcgcatgggcattctccttatcccagtcgtggatgagggtgataaacgcctgctccatggtcgggtccgggacctcatcgtcggcggcctggtttttcaggtcgtccggcgtgccgtgggcaatcagcttgccgcgatacaccagcccgatgcggtcgcagtactccgcctcgtccataaagtgggtggtcaccatgacggttacccctttttccaccatgctgttgatatgcagccagaactcacggcgggtgaggggatcaacgccggaggtcggctcgtccagaaacagaatatccggctcgtgcattagcgagcaggccagcgccagccgctgcttaaagccgagcggcagttcgtcggtggcgtgggaagcgatagttgttaacccgaaggcgtcgctcatgcggcggatcttctcgttctgcgcccgcccgcgcaggccgtacacgccggagaaaaagcgcagattctgctcgaccgtcaggttgccgtacagcgagaacttctgcgccatatagcccaggtgctggcgcgccttgccggagctgaccttgagatccatatccagcaccagcgccttgccggacgtcggcaccagcaggccgcacatcatcttaaaggtggtggattttcccgcgccgtttggtccgagcaggccaaaaatctcgccgcgcttcacggcaaaattcacgttgtcagtggcggcgaaatccccgaattttttggtgagggatttggcttcgatcaccgtttcgcccggcgtaccttccaccgtgtgcaggatcgccccaagcggcgactcggaggtccccgcgccgcccagcaggtcgatgaacgcatcttcaaaacgcggcgccgtctcttccatctcaatcgtcggcattccaggcgcccggcgaatatcgtcgacggtggcctcttttttgaggatgacccgcaccgagcggccctgaatcatcccgtcgctgacctgcggcagcctgagcacccgctgcagcagcgagcggttggacgcctgcgggctgtgcagcaggaagctgcgcccggccatgctctgcgtcagcgtcgtcggctcgccctgatagagcagttcgccttcgttcatcagcagcacgtcccggcactgttccgcttcgtcgaggtaggaggtgctccagaggatcagcatcccgtcgcccgccagctcgtgcaccatctgccacagctcgcggcgggaaatcgggtctacgccgacgccgggctcgtccagcagcagcaccttcggctcgcccaccagcgtgcaggccagccccagcttttgcttcatcccgccggagagcttgcccgccagccggtcggtgaacgggccgagcgaggtaaattccagcaggcgggcgaaggttttctcccgggtttcgccggtgacgctgcgcaggtcggcgtacaggttcaggttttccatcaccgtcaggtcttcatacaggccaaacttctgcggcatatagccgagcatggcgtggagcgggccgtcgtcttttatcggatccaggcccagcacgcgggccgatccttcatccggcttcagcaaccccgccagcatgcgcatcagcgtggtctttcccgcaccgtccgggccgaccaggccggtcacgtagcctttccggatggtgcagttcagcggcgcgaccgccggtttgtccatccctgcgaagcgtttgaccagattgttgagctggataaccgcatcattcatgtcgttccccgctgttcacttttacggtgacgggcatgccctggcgcagggcgtcgtccgcatcggtcacgataatgcgcaggcgatacaccaggtcggtacgcaggtccggcgtttcaaccgttttcggcgtgaattcggcggtaggggagacaaaccccaccttgccgtgatacggcttgtccgggcgaccgtcggtatagagcagcagctcgcggcccggctgcatctggccgagattaggctcatcaatgtaggcacgtacccagaccgggcgggtcagggagagggttaacacggtgctgcccgcgctgagcatgctgcccggctcgacggcgcgggtcatcagcgtgccgtctgacggtgccaccagcgtggtgtcgtgcagatccagctctgcctgcgacagctgggcctgcgcctgttcaaggctggctttcgcctgggcgatatcctgcgggcggttaccggtgtggtactggcttaatttatcctgcgcggacttcagggttgcctgcgcctggtcgcgggacgagcgcgcattttccaggtcattcgcggaaatggtgcggcttttccacagcccctgctggcgggcgtagaagttctgcgcgtagtcataggccgcctgtgcctgtttgacggcggcagcggcctgggcgatctcttcgtcgcgatagccggccagcatcaggtcatactgcgcctgcgcaacggagacgcccgctttggcctgcagcagcgcgttctcatagggggctttgtccagcatcccaagcgtctgcccggttttaatggcatcgccttcgtcaacgctcagcgcggcgagacggccgccgacgcggaagctcatgttcaccgtgcgaatatccacgttaccgtacagcgtcaggcctttatcctgatggctctggtaccacagccatccaccgacgcccgcggcaagcaaaacaacaaccaccagaatgatggcgacaggttttttcatgacttcaggctcctttgcgttaagccttgcaggatcagatcgagatgacaggcgatcacctcaccgatctgcgcggctatatcctcatcaaattgtgtccagccggtgcgtaacaggatggtttcccggcccagacggaaggcaaggatttcacccagcagggcgtgggtatgcaaaattgtcgcggtatcgccggcatcccgcccggtataggcggcgatcagccgggtcaggtgggtatgcatcggggcaatcacccgatcgtgtacccgctggtaggcggcagtgggggagagctgctcgcgggagataaacttgctcaggttgagcgtatcgtcgtgcgtcagcacgcggatcatgttgtggcaggcactcaggatcagctggtggatggcctcgcgatcgggcgacggctggccgagcagcgcggtggcctcctcaacgtgcgggtgaaactgcgtgccgataaaatcggcgatccactcggcgcaggcgagatataaatcctcttttgagccaaaatagtaggtaatcgccgcaatgttttgcccggccagcgcggcgatatcgcgcgtggtcgcgtgcagcccgtactcaccaaactgcgccagcgcggcggcaataagctggtttttggcctgttcacctttggttgttgtgggtgttgtattcatggcggcattaaaaattaatcaatcgattgattaagattatgcctgattcgcatccccgtcgagggaacgcggagggatattttatgcgccacgtcacaaaagctgctacactccgccccttcgcgacattgtggtttttgtcctctcaattgttagatctccctgaaaactacacctgtgatggtcggggcggttcggagtttttatgtcttttgattcccttggcctgaacccggaaattctgcgcgcgatcgcagagcagggctacgttgagccaaccccaatccagcaacaggctattcctgccgttcttcagggccgtgacctgatggccagcgcccagaccggcaccggtaaaaccgcgggctttacgttgccgctgttagaactgctggtaaaaaatcagccgcacgcaaaaggccgtcgtccggttcgtgcgctgatcctcaccccaacccgcgagctggccgcgcagattggtgagaacgtgcgtgactacagccgctatctcaacattcgctcgctggtggtgttcggcggggtcagcatcaacccgcagatgatgaagctgcgcggcggcgtggacgtactggtggcaacgccgggccgtctgctggatctggaacaccagaacgcggtgaagctggataacatcgaaattctggtactggacgaagccgaccgcatgctcgacatgggctttattcacgacattcgtcgcgtgctggccaagctgccgccgcgtcgtcagaatctgctcttctccgcgaccttctccgacgagatcaaggcgctggcggaaaagctgctgcataacccgctggaagtggaagtggcgcgccgcaacaccgcctctgagcaggtgacgcagcacgttcactttgtggataaaaagcgcaagcgcgaactgctctcccagatgattggccagggtaactggcagcaggtgctggtctttacccgcaccaagcacggcgcgaaccacctggcggaacagctgaacaaagacggcatccgcagtgcggcgatccacggcaacaagagccagggcgcgcgtacccgtgcgctggcggacttcaagtctggcgacatccgcgtgctggtggcgaccgacatcgctgcccgtggcctcgacattgaagagctgccgcacgtggtgaactacgagctgccaaacgtgccggaagactacgtgcaccgtatcggccgtaccggtcgtgcggcggccaccggtgaagcgctctctctggtgtgcgtggacgagcacaagctgctgcgcgacatcgaacgcctgctgaagaaagagatcccgcgcatcgaaaccccaggttatgaagtggatccgtcgatcaaagccgagccgattcagaacggtcgtcagggcggtcgcggtcagggcggcggtggtcgcggcaagcagccgcgtcgtgccgaaagtggcgcgccgaagacagcgggcaaaccgccgcgtcgtggcaacgacagcaaaccggccggtgacaatccgtggcgcagcggcgaaggcaagccggcaggggaagggcagcgccgacgccgcccgcgcaagcctgctaacccgcagtaatctggaagcccggtcgtaaagccgggcttttctttttgcggcagcgaagagaaagtgccacaatagtggctgtttatacagtatttcaggttttccaatggctttaaccgcggcgctgaaagcgcaaataggcgcctggtataaggcgctacagcagcagatccccgattttatcccccgagcgccgcagcggcagatgattgccgacgtggcaaaaacgctcgccggggacgacgggcgacatctggcgattgaagccccgaccggcgtcgggaaaaccctgtcgtatctcattcccggcatcgccatcgcgcgggaggaagacaaaacgctggtggtcagcaccgccaacgtggccttgcaggaccagatcttcagcaaagatttgcccctgctgcgcaaaatcatccccgacctgcggtttacggccgcctttggccgcgggcgctacgtctgcccgcgtaacctggcagggcttgccagcagcgaggcgtcgcaacaggatctgctggcgttcctcgacgacgatctcacgcccaacaacaaagccgagcaggagctctgcgcaacgctgaaaggcgatcttgatggctataaatgggatggcctgcgcgatcacaccgataaagccatcagcgacgatctgtggcgcaggctcagcaccgacaaggccagctgtctgaaccgcaactgtcactactaccgcgaatgcccgttcttcgtcgcgcggcgcgaaattcaggaagccgaagtggtggtggctaaccacgcgctggtgatggcggcgctggagagcgaagcggtgctgccggagccgaaaaacctgctgctggtgctcgacgaaggccaccatctgcccgacgtggcgcgcgacgcgctggagatgagcgcagaaattaccgcgccctggttccgcctgcagctggatctcttctgcaagcttgtcgccacctgcatggagcagttccggccgaaaaccacgccgccgctggcggtgccggagcgtctgagcgatcactgcgaagaggtttacagccttatctcgtctctgaacaacatcctgaatctttatcttcccgctaccctggaggcggaacaccgctttgcgatgggcgaactgccggaggaggtgatggagatttgccagcagctggcgaagcatctggaaaagctgcgcgggctggcggagatgttcttaaacgatctcagcgagaaaaccggctcgcacgacgtggttcgcctgcaccgcattctgctgcagatgaaccgtgcgctcggcatgttcgaagcccagagcaagctctggcggctggcctcgatggcgcaggcgtcgggcgcgccggtcaccaaatgggccacccgtgaagtgcgcgacggccaggtccacctgtttttccactgcgtgggcatccgcgtggccgatcagctggaaaagctcatctggcgcagcgtgccgcacgtggtcgtgacctccgccacgctgcgctccctgaacagcttctcgcggctgcaggagatgagcggcctgaaagagaaagcgggcgatcgttttgtcgcgctggattcgccgtttaaccactgcgagcaggggaagctggtgatcccgcgcatgaagtatgagccgcttatcgacaacgaagagcagcacattgcagaaatggcggcctacttccgcgaacaggttgagagcagaaagtaccccggtatgctggtgctgtttgccagcggacgggcgatgcagcgttttctggaacatgtgaccgacctgcgcctgcttctgctggtccagggcgaccagccccgttaccggctggtggaaacccatcgcaagcgcatcgataacggcgagcgcagcgtgctggtaggattgcagtccttcgcggaaggtctggatttgaagggcgattacctgacgcaggtgcatattcataaaattgccttcccgcccatcgacagcccggtcgttatcaccgagggcgagtggctgaagagcctcaaccgctatccgtttgaggtgcagagtttacctgcggcgtcgtttaatcttattcagcaggtcgggcgtctgatccgtagccacggctgctggggggaggtggtgatttatgacaagcgtctgctcacaaaaaattacggccaacgcctgttaaatgcgctgccgatctttccgattgaacagccagaggtccccgaggtaaaaaaacgcccggcaacactgaccgccgggcgcaggaaaagcatccgtgctaaggggcgcggtcctactggtaagtgaaggtcacctgcaccacgctgctgaacgtccccgcgctcaccggcatggaggtggcgtagtagcgtgcggcgagtgggaaggtggccgtatgatcgttttgattaatcaccgcgttaaagctcgcctgcggagcgatgagaatattgtcctgccggtctgccagctccagcgccagcccctttgcactgccgatattggcgaatttagtggggtgcgtgctgtccgcctgtccatagaagtaggcggtggcaagcgcgaggcttggcgggcagtgggatactgacagggaaaagtctttccactcgccggtatcgcccacgtctttaaaatcaccggatgccgcctgacctaaatccaccgtcaggttccggctggcgctgtcgatgatgcaggtattggcgtaaatgttgcccgtcatctggatctgaatatcctcggcgtgtgcctgggcgatcagccccagcgccataaacgcaattatcttcttcatgtcagttacttataagcaagcgtgatggtggcaacggtgttggccggaccgggagtgaccacgtcgctgacctgctcgtagcgcacctcaaacggtatggtcagcgtttcgttggcaatggcttcgcttcgggtgttaacgtaggtatcaaaggtggcgatattgtcgtcgaacagcattcggacaccgacgcccgtcgcgacgccagtctgctgcgtgagtttcagcaccccttcgaaggccgtttcatagccgtttgagctggtaattttcacttcaggctgtacggtgctgttgcagttcaccgtgacgtcaaagtttcgtgccggggaagagagcatccccacgctgataaagtcgctgaccgggaaatcccccagattgaccgtcaggtttttcggcaggacggagcaggtgacctctttcagaataacgttgccagcataggagatggtgttgggatcgcccagcccttcgtggtgataaaccccgatcccaaaacgggtctgactttgattcagcgtgcctgacgctacggtatcgctggttttgaccaactccagcgtaacgtcgaaattaaaggtctgtttgccatcgctggaaacataacccaacggcgttcctgtggaaatgcagttaacgcccccggctccgctgatgcgctgcccctgatcgttcatcagggccacaccgatcccaggaacgcccgaatcgtagacacctttcaggcctggaatctcagacccagtgccgtagtaacaagagacaatttccagtcccttatcttccgcattgtcacaattaccggcgatatgggcgatttgctctgtacccgggatcgtttcgccaacggccagcgtcgtgggaacggagatagaggccacgttgatcattttcggcaggtctggcgtagtacaggtcgccttcgcatgcggcataaataacgcggcggttcccagaaccagtaagaaaaagcactgtttaatcatttgcataatcgttagcctgaacggtggatcagtgacactgcgcggcagcgttaatgatgctggttttctctttctcatccgttagcgcatagtcagcgacgcagtgctcgttcgccccctgtccccaggaaacgttgagatgcccttgctgcggcagaccagagaggtaggtctggccgtcattcccgacaataaattcgctgtccttatcctcggtggtgaccgttgcgccgaagggcagcggtttacccttttgcgtaagcgtcatcaggacgcggttacccacgcgggtgttaaagctggcgcgcaccacggccccgcgggttggcgtcacgatctgcgccgcgtgggtgacgtcggcgttgtccggtagcgtttcggtatccagctcgatggtgttgtggcgatacgcggtaacaaacggcacgacggtgtagccgcggaagtcggtctcgacgcccgtctggttcgtgatatgggttccgtgcgtgcccggcgctttcaccagcgcgatggtgtcaccgagcggctggctcagggttattccgttcgcatgggcaaccacgccgccctgcaaaccgacgttcacggtctgctgatatttatcctgactgacgcctgcgctcacttcgccataggtcgctttataatcggcgttgatgctggtggagttaccgctgccggtgctgctcagcccttcctggatgttccagttcaggttgtcctctttcagcgccgtgccgttcaggccgatgttctgcgtcgtgccgtctttggtgttgttcaggttgtaggtggcccaggtgttatgcatccagcggtccagcggcaccgagacgctcagcgagaactggttgtcgtttgtcacctcgttaccgtcttcatcgctgtcctgggtgtttttgttcatgctgtagctgaggctgtagctcaccccgtgccagctattgttgtagctgacgctcatcgaggtcatgttctggctctgactccagtacgtctctttcaccatgctcagggtgacggatccccagccttccggcagcgtctggtcgatggtggcttcggttcgggcgcggcgctgctgcggtgcagaccagtcgtcggagcgggtatatgactccatggtgtcttcaagggtgtaaaaccctttgctgttgtagcggtagccggccagcgagaagttggtgcctgaccgggcgatgtctttgctatagcgcacgcgccacgactggcctttgctggcctgctgttttttcaacagggcctttgcgcgggtcacgtcaatggaaaaggcgcctaaatcgcccatgtttttcccgacgccagccgcctgagactggtaatggctgctctgctgcacgccaccgtaggcggtgaaaccgtagggtaaaccgtagatggcgctgccctgggcaaacggggtcttctcgacgtcgttgtcataagaacggtagcgtccggcagtcacgctgtagcgcagatttttttcacgctgcaatatcggcacggaggcaaacggcacgacgaaatggctttcgctgccgtcggtctctttcacggtgacctggagatcgccgctgctgccggtggggtagagatcgttaatttcgaacgcgccgggggcgaccgtgttctgataaatgatgtaaccgttctggcgtaccaccacctgcgcgttactgtgggcggtgccgcgaataatgggggcgtagcctttttcactgtccggcagcatgtcgttatcggatttcagctccacgccggtgtagggtacgctgtcaaaaacgtcggaaggcgaggaactctggccgacggtgaggtcgcttttcatcgccacaatatcgcgttgcgcgtaggtatatacggaggtgaatttttggtcctcctcattacccgtggtgctgcgattccaggtggaatagttgcgaatgcgccatgcgccaatgttcaaacccggacgcaggttaacgtactggctgctgttatcctgttcacccggctggcgcgcatggctttggctggcatttgcactgtagttaagcaggcccgcgttaattccttcgtcaaactcttttgggtcaatgtagccgcgaggcacctgaccgagcgccgactggggaatgctcagcagcagttgctggttgcgaacgcggaaagtcgcggatgccgcagggatggcgtgtaaatcggcgcactggcctttggctttcagctgcggatatttttgggtcttgatcccgaggctttttaaatcgtccacgttaaagcaaggttgcagcgtgctgttgccgtgatcgtctttctgcagcgtaaaggtgacatcgcgggtatcaattttattattattgataaacaccgtaacctgatatttacccggcgcctgacctgggcctttttcatagacggataaatcggtttttccctgctggggattatcaatatccagcagggcagggttaaaataatcatcagccataacctgatgcgcaaagatcgccatcgccaggccaaaaagaatgaccagcaatgacgaaaatcggcaggtgaacggctttttatggctgtacatgattattttattaccggggaaaagtattaatgaacggatttcgaccaggtatggctgatgctgccgtaatcagtaataatggaatacgtcacgttcgagcctctgacattacccggtatggcaaaatgcgtttctgtttttggaacggcccaggtcgctttcgtcactttctgaccattcagggtgaccgcctggaaattcatataaaacggcgtggggttattcaccaccagctcgttaccttcgcgacgccattcaagggttctatggttgtgatgaggcgatggttgtgactaattcctacttcacacgctctgccaaagaattagctgaatcagccttggtacgtttgatcgacagggatgaactgcaaaagtatctggatgattacaatcagaagataattgaagatttccagtcaaactcgtaactttgcagtcatatagatatagcaaaggacaggtaggcctccgtgagaggaggacttacctgtgcagattctgtgctcaaagttatccaagtctatctatttactgccaattacagtaaaatgagtaaacaattacagcaaagtttcgcaatgcactgctatgtaactcattgatcctgcgtagaatttaaaatccctcggcgttcgcgctgtgtgggttcaagtcccactccggctaccatgggaaacaaagaataatcaaagcaataagcagtgtcgtgaaaccaccgaaaggtggtttttttgtgcctccagtttagcgcgaagtgagcgtatctcatcgtcatcacgatcgtgctgtgcccggggatttgctgccataccagaacgtcaagcctaactctctaatatcaagcccggaaagcagggcgattgtcagctaacctgcaaccaatcttaaacaaacatttcactcgccagacacaggttgccgctgctgataagctggttggtatccaccctggagagcggaaggttattgtcatgcaatatgaagaacagcagcttatcaacggccttttcgagcgtcttaaacaggccgaacaacaaaacagccaacgggatgcagatgcagagcgtcagatcgctgaatttgtcaggcagcagcctgcggccccctactatatggcgcagtcgattttgattcaggaagcggcgctgaaacgcctgcaggcccgtgttcaggagcttgaaagcgaattagccgcgcaaaaaagcaaaccctcgacgggcggcagcttcctcggcggcctgtttggtggcgggaaaagtaacccgcagcctgacaacagctggaatgcccagccgcaacagccgccggcgcaggattactctcgggcgccagcgcctgctactcgcggcggcggttttatggctggcgcgctccagacagccgctggcgtggccggtggcatcgcgcttgccgagatgcttaccagcatgttccatcagtcgcggccggaagagatcgtgaacatcatcgaagagccgacaatgcccgtcggtggtgaaccgtttgtcggtaatcaatacggcgatgttaataacgtctctgacacccgtttcctcaaccagaacgatccgttcggcagtaataacgacatctggcagaacgacgatgtagatgacgactacagcaatgacgacgacagttttatttaacgacgttatcgtgtcaccatcgaaatgaagttaaccctaaaagttgggtatccaactttcggggttttgcttttccgggtcaaaaaagccttcgaggctaagcctgaaggctcataaatcacattctttttactatttttcttactaacaaaactgtaagaattgccggaagcaatccaaataataaggcgatatcgactaacgtatcctccagttcttctatcccgtatgtcccgaaatggtccatcacggcataagcccattcgacaggtgtcacatcacaccccgcccaaatacgccttcctcacctcctgattccccagcaattcctcaccgctgccgctcagccggatctgtccgttcaccatcacatacccgcggtcagacagcttcaacgcatggtgcgcattctgctccaccagaaaaatggtcataccgctgcgggccagctcgcgcagcgtctggaagatctgcttcaccacaatcggggctaagcccaggctgggctcatccagcagcagcagctttggacggctcatcagcgcccgggcgatcgccagcatctgctgttccccgccggacatggtcatcgcgcgctgcttgcgccgctctttaaggcgagggaaaaggtcaaacatggtttgcatgtcttcagccgcaaactgattgccgatgggaatggtccccatcagcaggttctcttccacggtcatatcggggaagattcgtcgcccctccggtgcctgcgcaatgccgccggacgcaacgtagtgggtggattgatggctgatgtcttcaccacagaacaggatctgcccgctgcggatacggggctggccgaagatggacatcagcaatgtcgatttacccgcgccgtttgcgccaatcagcgccacggtttcccccttattcacctcaagagagacctgcttcagcgcctgaatgacgccgtaaaacacgtccacctcgcgaaaagccagcagcggttcgctcatagggagacctcgctttcatcggtgcccaagtaggcggcaatgaccttttcatcatgctggatctgctcgggtttacccctggcaatcacatcgccgtggtcgagcacgataatgtcgtccgaaatgtccatcaccatccccatatcatgctcaatcagcaataccgtgatgtcgtgatgatcccgcagaaagcgaataatgccgctcagcttgtgcgtttcaaccgggttaagcccggcggcgggttcgtccagacagatcatctccggcccggtacacattgcccgcgcaatttccagtcgccgctgctggccgtatgacatctctcccgccaggcgattggcgcactccaccagatccactacttccagccagtagaaggctctgtccagggcgtcgctttccgcccgccggtatgccggcgtatttaagatcccggcgagcagattacggttaacgcgcatatgctgcgcgaccagcaggttttccacgaccgacatctcgcgaaaaaggcggatattttgaaacgtgcgcgccagcccggcacggttgaccaggtgggttccgccgaacattttgtagaaaagacgctgcccgaactgcgcggggttaatccagtcgccgggctggaatttttgcccgaggacctgaatcacgttggtcgttttatggcgggtattaaacaaaatgttgccgccggaggctctgtagaaccccgtcaggcagttaaacacggttgtttttcccgccccgttggggccaatcagggcggtaatggagccgcgctgcacgtccaggttgacgtcgtttagcgccttaatcccgccaaaatgcatcatcagatgctcaacgcgtaatatcgtttcgttcatggtgcgacgcccttacgcacggcaaacccgctgcggttaatgcggatcaaaccgcgtggacgccagatcatcatcaccaccatgagcatgccaaacagcaggacgcggtactcggcaaaactgcgcagcagctccggcgtgaccgtgagcacaaaggcggccagcactacgcccagcgtcgagcccataccgcccagcaccacaatggcgaggatcaatgccgattcaaagaaggtaaaggaggtcggattcacgaacccctgataggtggcgaagaacaccccggcaatgcctgcggtggacgcgcccagcgtaaaggcggaaagcttaaccagaacatgatttaaccccattgagcggcaggcaatttcgtcttcgcgcagggcttcccacgcccgaccaatcggcatgcgcgtcaggcggtgcttgatgtaaagcaccagcatcaccaccagaaacagcaccgcgtagataaagataaacttcatgttcgggttgtaggtcaggtggaaaaactcgtggaagggcacgccgccttcttttgcgcgtcgcccaaactcaagaccgaaaaaggtggggggaggggcagacacgccgttggggccgccggtgaaggtcagccagttgttcagtatcaggcgaatgatttccccgaagccgagggtgacaatggccagatagtcaccgtgcatgcgcagtaccgggaagccgagcaaggcacctgcggcagcggccatgattgccgcgagcggcagcatgctccagaagcccaggccgagatactggtatcccagcgccaggccgtacgcaccaatcgcatagaacgcgacataccccagatccagcagaccggccaggcccacgacgatgttcagccccagaccgagaagcacgtagatcagccccagaatggcgacggtcagaacatacttggtggcgacaaacggaaagcaaatcgcaagggtaatcaccagaggaataatccagcgcatgcggcttttatattccggtggccggacataaacacccgcgctgtcggcctcgaagcgcgcctggaagcgggccccggcagcggtacctaaaaaagcgctcaacagaaaacgccccgccatgacgataccgaccatccaggccaggcgctgcccggcgaaggtaaagctgtacccgtccagcaccacgcccgcgatagggccgaagataatcagcgcaatcaacccggaaaaaatcgcgtccagaatgcagcgtttaagtgaaaaaccgtgtgatgtcatcgttctctccctcacactttggccacaatcgggcgcccgagcagcccctgagggcggaaaatcaggatcatcaccagcaggccaaacgagaagacatctttatagtccgagttcaccatgcccgagaactgcgcttccgccacgcccaggataaggccaccgagcatggcgccggggagggaaccgatgccgcccagtaccgccgccgtgaaagctttaatgccgatcacgaacccgacgtagaaatcaaaggtgccgtaattcatggtgatcagcacccccgccaggcccgccatcgccgcgccgatgacgaagaccagcgaaataatccggtcggtgttaatccccagaatggaggccattttgcgatcctgctgcaccgcacggcacatccgccccagccgggtacggttgattatccaggtgagcaccagcatgccggcaaacgaggccaccaggataaacactttggtgtaggttatctgcacgaacccttcgcccagatgcaggcgaatcacgccgtccagcatggttggcaccccttgctggcgcgggccttggctcaactgcgcgtagttttgcagaataagcgatatcccgatggcggagatcagcggtgccaggcgcgtggagttgcgcagcggcttataggcgatacgctcgatggtccagccgtacaccccggtgaccacaatggtgaacaccagcgtgccgaggatcagcagcgggaaggactgcaggccgaagaacgagagcagcgccaggccaatggcgcagagataggcggaaatcatatacacttcgccgtgggcgaaattaatcatgccgataatgccgtacaccatggtgtagccgatggcgatcaggccgtagacggaacccagcgttaagccattgattaactgttgcaggaagaatgtactcattttagcgcgctcgttttataggctgcgcgagccgcgcagcctgatgtttattacgcgccgacgggcgagcccatcgacgttgagcgtgactccgtcccgttactccacttccttatattttcctttgtcgtcccactggtaaaccacgtagtcagagactttcagatcgcctttgctgtcccaggcttttttgcccatcaccgtgtcgacggaattggccttcagccactcgctggctttggcagagtccttgccgccggtggccttgaaggccgcggcaatcgcctgtaccgaggcgtaggagtagagggtgtaaccttccggctcgaatttaccggcgcggaatttctcgattaccgctttgccgtccgggatcaggcgcggatctttaccgaaggtcatgtaaatgccattggtatattgcgggccgcccgccgcggtcaccatctcttcgttgacgatacagtccccggagaagaatttcgcctgcacgccctgctcacgcatctggcgaaccagcgggccggcttccggatgacagccaccgaagaacacgacgtccggtttttgcgcgccgatcttagtgaccagcgcgttaaagtctttttcaccgcgggataatccctcgtacatcacatcctgaaccccgcgtttcgccagcgccgctttggtggcgtcagccaggccctgaccataggtgtctttatcgtgaataatcaccacccgtttggctttcagcttgtcgatgatgaagtcgctggccacctggccctgctggtcatcgcggccgcacatgcggaacatgtcgctcatgccgcgttcggtaatcagcgggttggttgaaccgggggtaatagcgatgatccccgcatcgctgtaaacctcggaggcgggcatggtggaagaggagcagaaatgaccgaccacggcgttgactttatcctggtcgactaagcggttggccaccgccaccgcctgcttaggctcgcaggcgtcatccccctgaaccagtttgatcttctcgccgttaatgccgccggcggcgttaatgtcttcagcggcctgcgttgcgccgtgccagtactgatcgccataggtggcattaggacccgtgaacggcccggccacgccaatcacgatatctgccctggcggaaaacgccgtcaccaggcaaccggccaacacgagagaaagcggagttctgataaatttcagcgacattattatgttccttagcaaagaggtttttgcaccacggcgtaaacccgaacgcccgacggcgcagccaatccgaaacacgagcaagaacaaaatgcactaaacgaacaagatacagacggcatcctgcatatacggcgaggtttccctgcgcagcgtcgcgcgaagaacattaagcaaaaacgttgccagaatggttaacccattgacgggcctgtgacatgtttgagtatagagcgccgcgttatgccgccttgcgggaggagaagaaattacagcggagatcacatatcgttaacaataaagcccataagttgtgcaaaggtcacgatttgcacgtttttgcagcaataaagacctaaacttcagcccggagaggcgtgagatatgtgttaggatcgtttcctttttatcaggagtgtcagcgatgactgaaggcccattaaatgaaagcgaaatggcgtggcttgaagagacgttaatgtcttacggtcatgacgatgcgtccgtgcttgacgtgtctgaactggacggcatgtttaccgcagtgctttccggtcctgttgtcgttgagccagatacctggctggtggcggtgtggggtggcgagaaatacattccgcgctggaaaaacgatcgcgagatgaaccgttttatcgatctttgctttaagcatatgaacgatattgccgagcgcctgagcgaatatccggaccagtttgaaccgatgtttggctataacgacattgacggtgagagctataccgtggtggaagagtggtgctacggctacatgcgcggcgtggcgctgacggactggtcagccttgccggacgagctgaaggccgatctggatgtgattgcgctgcacggtagcgaagagatcggcgaccagctggatgaattgaccgaagaagaatataccgccagcattgaacgtattcagcctgcggcgctgcgcttgtataactactgggtgaacaatccgcagcagccggaggtgaagaagccgatggtgaacggcacgaaggttgggcgtaacgatccgtgtccttgcggcagcgggaagaagttcaagagctgctgtttgcactgataaaaaaggggctgatgacagccccttttttcattaacccacttccggcagcattcccgccgcaatcagtacctgcaccagaataatcaccaccccacagccaaacacaatgcacagcagcggttttcctcccgccacgcggtaaccctgctgcggatgctgctggcggctcttccacgccagcagggaagggaggagcagggcaaggaccgagagcgccacccccgcataccccagcgccatcacaaacccgcgtggataaaacagcgcaaaggccagcggcggcaggaaggtgatggccccggtctgtaatcgtcctgcggcggtattgcggcgctggaacaggtcggccagatagtcaaacaggccaagcgccacgcccagaaacgaggttgccagcgccaggtcggcaaagaggtgtaccgccagctccacgtgcggggaggtgacgacctcgcgcagcgccagcagaaaaccgttcaggcctgcatgctgtgccatcaggccaataaaggttgaagcgtcgatgctgcccagggtcaccagctgccagaaaatgtaggcaatcagcgggatcgcgctgccgataacaaagacgcggcgcagcttgcgaatatcgccgttcatatagctgacgatgctcggcacgctgccgtggaagccaaacgaggtgaaaatgaccgggatggcggaaagcgccagccctttttccagcggcagcgtcagcaggttaaccttgtgcacgtgcggtgccagcaggaccagcatgacaatcaggaacagaattttggcgctgaacaggaaacggttaaacagatcgaccagcgatgttcccacgcagaccacgccgccgccgatgagcgcaaagaagatggcgcccgtcgccggggtaatgtcagaaccaaaccagtcgttaacgctggaagcaatcagctccccggccccgctgatgtaggcggcggtcagggcgtacatcaggaacatcatgctgaagccggttatccactggccgtagcgtcccaggtagcgcgccgcgagggaacccagaccggtatcggcgggcacatgctggtaaacctcaagcaacagcagggcggtgtagcacatcagcgcccagagcgtccccagcagcagcagggtcatgccaaatcccacgcccgcggctgccagaggcattgccagcattcctgcgccaatcgtcgttccggcgacgataaaaatacttcccagagttctgtttttcacgctttcctctacaacgcttcttaaccgcgacaaaatctgcggcgcagagtaagggaaaagctgtaactcgtcaaatcaccgttacaagtgttgtaatgaatattttacacattattgttcctctgaccctttataggcttccgcctactacatgagggcaatgttgctgagcaacatttcggcgtaacgtaaacaataaatataaattatcaaataaagtgagggttttatggcgggggagaatccttttaccgcggcatggagccgtggaggcaacctgttgtgccatggccactggataatccactggcagaaccagcccctgatacttccggagtcccgccgcgaaaaagatatgggcacctggggaatctattcggttattgatcctgaggatgagacctttgcacaaggcttacaggaagatgagtggatcatagcgaatgtcgactggttgacggatatgtttttcgagaggggtattgcgctggagacggccagctaccgctatttttaccaggccgtgaatcctcacgactggcgctgcaccagctgcgctgggtgtatgtaaattaacgcggtgcagggaacccgcaccgcgctgaaattaattctgcgtatccagcgtggaaagttctttatcaataaagtaaagaccttcgcctgatttccccaccagagataatttatccagcacggatttaaacagcttctcttcttcatgctgttcggcgacataccactgcaggaaattgaaggttggataatcctggctggtgatcgcggcatgaaccagttcgttaattttctgggtgatcagctgctcgtgctcgtaggtggcgcggaacagttcatcgagagaattatattcagcaaatggagatgccacggtttcaatgcgcggcaggctgccggtatccgtcagataatcaaacagacgctgcatgtgggtcatctcttcctgcgcgtgacgacgcagaaacgcggcagcgccttcgaagctgtgatagctgcaccaggcgctcatctgctggtagagaagggatgaatacagctcaagattcatttgtgcgttgagcttgtcgatcatttcagttttcagcatggtggcgctccgggttattatttctggttcacaatgagcgacactataatttattatttaattatttgcaaaaagtaaaatatttattttatttatttaaaatacgaatgggaataaaacgcattggcgattttatcatttattaatgagaattgtttttgttcgtaatgaaataaactgccagcctgcgctggcagtctggattaataccacggattgtttgacttagggttcacggcataacccatacatttatactggatagtcacgctctcgttcagacacaacgagccgctaatgagggtgcaggttttaatgggctgaccataggctgaggccgtggcgtaccccatgctctgacacgcttttgccgccgtaccgttattcacatactcatcggaatacgcattttgcagcgctgcctgaccgtagttaaggcggacgatgccgttcggcgcatcgaggctgctgacttcagcctggcggttaatgctgcaccccgcgagcaggaggagtgtgccggctacaatgactcttttcatggttcgctctgagtggatggaaatacgttatcgtacccgcagatgcccgccgcaatggctggaatagccggacaatctgccctcactcttcgcaacgggtcgatggtgaacgcgatcagaccccactctgattaaattgtgacttctatcacaaaaacattgatttttgtgatggtggtcatattataagcgcattgacgataaagttgtataacaagttgatggagcatcactgtgaaactgcgcaaaatcctgaaaagtatgtgggccaattactgccgcacgttcaaagacgtgccgccgggcgccatgttctgataaaaaaaacctgcttcggcaggtttttttatacctgcagacgttgaagggaagatgtcagggggcgtgttttgatactatggcggcctttaaataaggagaaaccccatgtcacaaaacctgagcgccgatcaggaactggtctctgacgttgtcgcctgccagctggttatcaaacaaatcctggatgttctggacgtgattgcgccggttgaagtgcgcgagaagatgtctacccagctgaaaaacatcgattttgccagccatcctgctgccgctgacccggtaacgcttcgtgcgatccagaaggccatcgcgctgatcgagctgcgattcacgccgcagggtgagtcccactgacgcagggaaatgggcgacggcatgcgtcgccctttgatgttatcagaagaacgtctggaccagcaggtagctcgcggcacacgcgcagcttaccccaatcagccctggcaaaataaagctgtggttgatgataaatttaccgatgcgggtcgtgcctgatcggtcaaagccgatgcaggccaaatcgctgggataggtcggcaggacaaaatagccgtaggacgccgggaaaaaggcgatcagcattttcgggtcgatgcccaacatcaaccccatcggcgcaaccgccgtcagcgccgccgcctggctgttcaccagttttgacaccagaaacagcacaatcgcatatgtccaggggtggcttttcaccacgccttccagggccagctttaactcgtcgagatgcgcctggaaaaaggtatcgctcatccacgccacgccgaataccgagaagatcgcaaccataccggccttgaacaccgcgccgttggaaatcgcggaggcattgaccttgcaggccatcagcatcacggcacccgcaattagcatcatcatctggatgacaaggttcatcgacagcgccgtcattttgcctttcagttcaaaggcggggcgcagctcagggaaggcccccagcagaacgaccacggcaatgccggcaaagaaaatccacgtggaccagtaggcctgttttgggaaacgctgattcattaacgtctctgttccgccatagataaactcgcgctgcttaggatcttttagcttttcctgaaactccatgtcgtccgccaaatctttcccgcgccgtaaactccacagtgcagtaatagccacgccgaaaagtgaagcgggaaccgacacggcgagaatttccagaattccccacgcgtggccgatcccatgctgggccgccaggatggacaccagcgacacgacggcaacggaaacgggggaggccgtgatcgccatctgcgacgcgaccgatgccacggccatagggcgctccgggcggatcccttttttcagggcgatatccgcaataatcgggaacatggtgtagaccacatggccggtgccgcacagaaaggtcagcatccaggtggtaaacggagcgagcagggtgatgtgctgcgggtgtttgcgcagcagacgttccgcaaactgcatcatgacgttgagaccgcccgccgtttgcagggtagcggcacagccaatcaccgcgaggatggtcaacatgacctcaaccgggggtttacccggctgcagaccaaagacgaaacataaaataaaaagaccaataccgctgattaacccaagccccataccgccgaaacgcgtacccgtcagcaggcagaggagaatgacaacaaactcaatggtgatcatgatgctccctcgtcaatgattatgtaattaaataaatcatcacacgttgtgtggttaatcattgggagccagatctgatttgttaaatttcagcaaaagcagaaggttggagaggggaaggggacctgctccccgggacggaagcaggccagaaactcagtggtgctgcaccgccacaatgtcgagcaggtgacggtcggtttgctcaggacataagcctgcctgctgcgcgttatgcagctcatccgccagcgtcttcagcagcaggccatcctgctgctgctctttatccatatcgcgtaagaatctcagcgtcgtaatgtcctgctgcgctttggcttcatcggccagtttgttgagggtgctgcagcgttgttcatactcttcaagcgttttctgaaacagttcttccagacaagagtagctctcgtttatcccatcaagggctttaacgacagggtttgcccctgcagctttcaggaagttaaaaacgcgcatcatatgggtgacgttgctttgtgcctgagagcgaaagaaggtggcagagcccgtgaggctattctcagcgcaccaggcacttaagtgaaggtgcaggttggaggcgtagaactcaaggttcatctgcgcgttaagtttttgcatcatcgtttgggtagccatactcatatccttattgacggtgggacgtgatgtccgttgcttaacctgagcaccaggcaagtacgaagaaaaagagcagaaatacgctttctgcagtaaacgaagtcgaccgaaattcacttcctgtgttcgatataaataagcatacccttgtctttggtctaagaaaactcttaaattggctgtgtttaccatacattacaaactttaatatagtacagaaatacaattagctcgccatagatcggtatttagataatcctctgataatcaacattttttatcgaagagatatgctgttactctttcgggaatattaaaccggaataatgctccgtaaaaaatgaatcacggattaattattccgtatatcaggtgcattaataaaattgcgctaaatcaaattctgtggagtaaataattttcagcgcgtgtggcatttttgatgaaaaacatactgcacttttctggcgtccggcgttctcgtgcccgatcctgggcatcagggatatcttagctaatcttatggataatcctgcttaccctcatttcatttgtctgacaaatactgccttttttatgtcatttttcgctgaatttatgtacgcaattactgtaattctgcggtgtgatggggctctcttatggatgattaatttcccgctaaaactatcaccagcaataacgcttataacgaggtaagcgctaatgccttgttttaagtccgattaaataagaagcacgcacatattccctacagaaaagaaagctaaagctggagtttgccatgcacaaatttactaaagcgctggcggccatcggtctggctgccgttatgtcacaatccgctattgctgagaatttaaaactcggttttttggtaaaacagcccgaagagccctggttccagacggagtggaaattcgccgataaggccgggaaagatttaggttttgaagtgattaaaatcgccgtgcctgacggtgagaaaaccctgaacgccatcgacagcctggcggccagcggtgcgaaaggtttcgttatctgtacgccggatccaaagctgggctcggccatcgcggcaaaagcccgcggttacgacatgaaggtcattgccgttgacgatcagttcgtgaacgccaaaggcaagccgatggacagcgtcccgctggtcatgatggccgcgacaaaaatcggcgaacgtcagggccaggaactctataaagagatgcaaaaacgcggctgggacgtcaaagagaccgcagtgatggcaattatagcggatgagctggacacggcgcgtcgtcgtacaaccgggtcaatggacgcgctgaaggcggccggcttcccggaaaaacagatctacaaagtccccaccaaatctaacgatatcccgggcgctttcgacgccgccaactccatgctggttcagcatccggaggtcaaacactggctggtggtcggcatgaacgacaacaccgtgctgggcggcgtgcgcgcgacggaaggtcagggcttcaaggcacctgacgtgatcgggattggcatcaacggcgttgacgcggtcagcgagctgtccaaagcgcaggcaaccggcttctacggctcactgctgccaagcccggacgttcacggctataaatccagcgagatgctttacaactgggtcaccaaaggggctgaaccgccgaaatttaccgaagtgaccgacgtggtgctcatcacccgcgacaacttcaaagaggagctggcgaaaaaaggactgggcgggaagtaatacgcggtgattgtgcccctcatcctgcgtgaggggcctgacgtacacactacaggaatcacggagacgttatgcgacagtctgatccgtatctctcttttcgcggcatcgggaaaaccttccccggtgtgaacgcgctgaccgatatcagcttcgactgctatgctggccaggttcacgccctgatgggggaaaacggtgcgggaaaatccacgctgttgaaaatcctcagcggcaactactcgccaacaaccggcacgctggcgatccgcggcgaagaggtctcttttgccgataccacggcggcgcttaatgccggggtggccattatctatcaggagctgcacctcatccctgagatgaccgtggcggaaaacatctatttaggacagctcccgcacaaaggcggcgtggtgaatcgttcgctacttaattatgaagcggggctgcagcttaaacacctggggctggacgtcgatccccagacgccgctgaaatatctctccatcggccagtggcagatggttgaaattgccaaggcgctggcgcgtaacgccagaataattgccttcgatgaacccaccagttcgctctcgaagcgggaaatcgaaaatctgttccgcgtgatccgcgaattgcgtcaggaaggccggacgattttgtacgtttcgcaccgcatggaagagatatttgctctcagcgatgccatcaccgtgtttaaagatggacgctatgtgcgcacctttaccgacatggcgcaggtgaaccatgaccagcttgttcaggcgatggtcggacgcgatctgggtgatatctatcactggcagcctcgccagtacggccctgagcgtctgcgcctcgatagcgtaaaagcgccgggcgtcagaacgccgatttcgttatccgtacgcagcggtgaaatcgtcggcctgtttggtctggtaggcgcggggcgtagcgaattgatgaaagggctgttcggcggtacccgtattaccgatgggcaggtctccattgacggcgagcgggtagacattcagaaaccggcccacgcgatcggggcgggaatgatgctctgtccggaagaccggaaagcagagggcattattccggtgcactcggtacgcgacaacatcaatatttccgcccgccgtaagtttattcgcgcaggttgcctgataaacgatagctgggagtcgagcaatgccgaccaccatattcgttcactgaatatcaaaacgccgggtccggaacagctgatcatgaatctgtcaggcggaaaccagcagaaggccattctgggccgctggctgtcggaggacatgaaggtcatcttactggatgagccgacgcgcggtatcgacgtgggggcaaaacacgagatttataacgtgatctatgagctggcaaaatgcggcgtggcggtgctcttcgcctccagcgatctgcctgaggtgcttggcgtggccgaccgcattgttgtgatgcgtgaaggcgaaattgccggcgaattacttcatgaacaggcgaatgaacaacaggcgttgaacctcgccatgcctaaagttagccaggccgtcgcctgagtaaggagttaatgatgtcctctgttactacatccggagtgccgaagtcgaagtcggcgttgagcgttgggcgtatctgggatcagtacggcatgctggtggtgtttgccgcactgttcgtcgcctgcgcgatctttgtccccaactttgccactttcattaatatgaaggggctgggtctcgccatctccatgtccgggatggtggcctgcgggatgctgttctgtctggcctccggcgattttgacctgtcggtggcgtcggtgattgcctgtgcaggcgttacgacggccgtggtgatcaacatgacggagagcctgtggattggcgtttttgccggtctgttactcggcgtcatcagcggcctggtgaacggttttgttatcgcgcgcctgaagattaacgccctgatcacgacgcttgcgacaatgcaaattgtccgcgggctggcctatatcatctccgacggtaaagcggtggggattgaagacgagcgtttctttacgctgggttacgccaactggctgggtctgcctgcgcctatctggctgaccgtggcctgcctgattctgttcggcttcctgcttaaccggaccacctttggccgtaatacgctggcgattggcggtaacgaagaggccgcccgtctggccggggtgccggtggtgcgcaccaagattattatctttgtgctctcggggctcgtttctgccgcggcggggattattctggcgtcgcgtatgaccagcggccagccaatgacctctattggttatgagctgatcgttatttcggcctgcgtgttagggggcgtttccctcaagggaggcatcggaaaaatctcatatgtggtggccggtatcctgattttgggcacggtagagaacgccatgaacctgctgaatatttcgccgttctcgcagtacgtggtgcgtggtctgatcctgctggcagcggtgattttcgaccgttacaagcaaaaagcgaagcgtaccgtgtaaccgttttgcacctcttttattgctcaacttataaccatagttgaccccttcaccgccccgccagtaaaactggcggggcggttgtcaaatggcgagcgacgtcacactgtctatacttacatggctatgaaagaggtaaaggcgtttacctctcgtcaaccgtaaggaggaaaagggtggctgacttgttaaccgcaccgcctgtactgcccggacattatgctttcttttttgatctcgacggcacgctcgccgggataaaaccgcaccccgatcaggtgtctattccggaggcggtgttacaggatttgcatcagctctcgctcatgaatgagggagcactggcattgatatcagggcgctcaatggccgagctggatctgctcgccagtccataccactttccgctggccggtgtacacggagcggagcgccgcgacatccatgatcaaacgcatatcgtttcactccccgacgcactcacgcaaacgctccagaagcggctctctgctgcgctggccgacctgcctggcaccgagctggaagccaaaggcatggcctttgccctgcattatcgccaggcaccgcagcacgaagatgccgtgctcgcgcttgctcagacggttgcggatgcgcatccacagctggcgctgcagccgggcaaatgcgtggtggagttgaagccgaaggggattaataaaggcgcagccatcaccgcatttatggcggaggcaccttttaagggccggacgcctgttttctttggggatgacctgaccgacgaggccgggttccgtgtggttaatcaggccggagggatcgccgttaaggtagggcctggtgacactgtcgccgaatggcggctggcggatgtcgccagcgtctggcagtgggtatctgatatcgctaaccagcaacaacaacaaatagcgcaaaacaaagggggaaaccattatgggtcgcttagtcgtcgtctctaaccgaatcgcaccgcctgatgataaaaaagccagtgcgggtggcctggcggtaggggtattaggtgccttgaaagccgctggcgggctgtggtttggctggagcggagaaatcagtgaagaagagaaaccgctcaaaaaagtgacgcgcgggaacatcacgtgggcatcgtttgcattaaaagagaaagactatgacgagtattactcgcagttctcgaatgccgtcctgtggccgacgtttcactatcgccttgacctggtcaaattccagcgtgaatccttcgaaggctacgcgcgcgtgaatgcgctgctggcggataaactgctgcctttaatagaagaagacgatattttatggatccacgattatcacctgctgccgttcgccagagagctgcgaaagaggggagtgaataaccggattggcttcttcctgcacatcccgttcccgacgccggaaatttttaccgcgctgccgccgcatgaagagctgctggaggcgctgtgtgactacgatttgctgggcttccagacggaaaatgaccgcctggcattcctggactccgtgtcagggaaagcgcgtctggtgaccaaaggcgggaaaacccatacggcgtggggaaaaacgttccacaccgaagtgtatccaatagggattgaacctgacgaaatcgcggagcaggcctccggcccgctgccgccgaagctggcgcagcttaagaatgaactcaagcacgtgaaaaatatcttctcggtcgagcgtcttgattattctaaagggctgccggaacgcttcctggcgtatgaaacgctgctggataaatatccggagcatcacggtaaaatccgttatacccagattgcgccgacgtcgcgcggtgaggttcaggcctatcaggatattcgccatcagctggagacagaagccgggcgcattaatggccgttacgggcagctgggctggacgccgctgttttatctgaatcagcacttcgaccgcaagatcctgatgaaggtcttccgctacgcggacgtcggcctggtgacgccgctgcgcgacgggatgaacctggtcgcgaaagagtatgtggcagcgcaggaccccgccgatccgggtgttctggtgctatcccagtttgccggggccgcaaatgagcttacctcggcgctgattgtgaacccttacgatcgcgatgacgtggcgaatgccctgaaccgcgcgctgaccatgccgctcacggaacgtatttcccgccatgctgaaatgatggagacgatccggaaaaacgatattaaccactggcaggcgcgttttattcaggatctccgcgatatcgccccacaaagccatgaaggcgatttacaaaaaaagatcgcaaccttccctaaacttgcctgatatttccctggggggttaacgccccccaagcggcactaataacacgtcaacctgacttgatgcgacaatggatttcgccgcgcaggccgcgcgcgataaaaagctgtggttatgattcccgcatatcactaaatcaatattctgtttacgacacatgtcgagaatatgggcattaagttctcctgtcgcaattacggtttcatagacaggatagtgtgccttttcgaccagctcgcgcagaaattgctgcgtttcctcctgaagtacctcacgaatatcctccagcatgggggcagccagctgattatacatctcgggttcggccgcaagcgtgatgaggctgatgcgggcattgtgaggtctggcaatggaaactgcccgggcgacgagttgatggctttctggggaaacggcaacagaaacaagtagatgggagtaactcatggcgcactccttgggtgtctgactgacagcgtttgatcacctttaccgcgattttccgggttctgcaagggctgattacgacattagtgtgaagcttagcataattattcattaattattcttataagaagaataactgaaaaatgcgcctaaatgaaaaaaattaacaacttaacgtaaatcacacaattttatgccttgactgttgaatcgttttgatgcgttacaaaatcatttcgaatgatcacgctctgaaacatattttttggactgcctgcataactctatgttttttcacagtaagaaaaatgtttcccggaggggtgaatgatgtaaatgtttccgcgcgacgtccacccgaggaaaagcacgttgcatgccagttctgattccccttctgcatgagtattcgtcaattaagaatacaaaacagtgtcgattggttaataattgaacaaattacaagtcatactgatggatttatgggtcatattcacttaaattgtgtgacgtagatcacattttttttaaatttgaggatggctggattgtatgtgtcaaaactgacgagtagagtttgcgtcgaattaggaaaaatcttagttatttgtaagaaatgataaaacatgtaagagacgcatttgcgtttcctctcttacgcgtttcgatgaatacaaacctaaattcaactatgcatttagccttttcttttttataccgggtgatttcccggcgacatcacggggtgcggtctttccgcataaaaataatagttggttattcgggatgggaacaatgcatacatccgagttgctaaaacatatctatgacatcaatttgtcgtatttactgctcgcgcagcgtttgattagtcaggacaaggcgtccgcgatgtttcgtctgggtattaacgaagagatggcaaccatgctgggtggtttaaccctcccgcagatggttaaactggctgaaacgaatcaactggtttgccagttccgtttcgatgactctcagactataacgcgtctgacgcaggagtcccgtgtagacgatcttcaacagatccataccggtattcttctctctactcgcttgcttaacgaaatcagccagcctgatgacgtagcccgtaagaaaagggcctagcaatgagcgagaaaagcattgttcaggaagcgcgtgacatacagttggccatggagctgattacactgggtgctcgtttacaaatgctggaaagcgagacgcagttgagccgtggtcgtctcatcaaactgtacaaagagttacgtggtagtcccccgccgaaaggcatgctgccgttttctaccgactggtttatgacgtgggagcagaatattcacgcttccatgttctgtaatgcctggcagtatcttctcaaaaccggtttgtgtagcggcgttgacgccgtgatcaaagcctacaaactttaccttgaacaatgcccacagcaggaagaaggtcctctgctggcgctgacccgcgcatggacgctggtgcgttttgttgagagcggaatgcttgagctgtcgcgctgcaactgctgcaacggcaatttcattacccatgctcaccaacctgcaggcagcttcgcctgtagtttatgtcagcctccttcccgtgcagtaaaaagacgtaaactttcccgggatgctgccgatattattccacaactgctggatgaacagatcgaacaagctgtttaacccgaacgtgtgggaaagattccagcagcggtaagcgattaccgctgcttttttttaccccgcgaacggtcaacgctgcgagctggacgtccttgccatagtcactagcggaaggatgatgtcgtgcttatcttattaggttacctggtagttctcggtacagttttcggcggttacatgatgaccggcgggcaccttggagcactctatcaaccggctgaacttattatcatcggcggcgcaggggtaggggcttttatcgttggcaacaacggtaaatcgatcaagggcacgctgaaagcaattccattgctgttccgtcgctcaaaatacaccaaaagcatgtatatggatctgctggcactgctctatcgcctgatggcgaagtcgcgtcagcagggcatgttctcgcttgagcgggatattgaaaacccgaaagagagcgaaatttttgccagctatccgcgcattcttgctgatgccatgatgctggatttcatcgtcgactatctgcgactgatcatcagcggcaacatgaataccttcgaaatcgaagcgctgatggatgaagagattgaaacccatgaaagcgaatcggaagtgccggccaacagcctggcgctggtcggcgactcgcttccggcatttggtatcgttgctgcggtcatgggggtggttcacgccctggcctcggcagaccgtccggcagctgagctcggcgcgctgattgcccatgcgatggtgggtaccttcctcggtattttgctggcgtatggcttcatctctccgctggccagcgtactgcgccagaagagcgcggaaaccaccaaaatgatgcagtgcgtgaagatcacactgctctctaacctcaacggttatgcgccaccgatcgcggttgagtttggccgtaaaacgctttactccagcgagcgtccgtcgtttatcgagcttgaagaacacgtgcgtgcggtgaaaaacccaaaccaacagacgacaactgaggacgcatgaaaaaccagtcccatccgatcgtcatcgtaaaaaaacgcaagcacaagggcggtgggcatggcgcgcacggctcgtggaaaatcgcgtacgccgattttatgaccgcaatgatggcgttctttctggtgatgtggctgatctccatctccagcccaaaagaactgatccagattgccgaatatttccgtacgccgctggcaacggcggtggccggcgggccgcgtatctctaacagcgaaagcccgatcccgggcggcggcgatgattacactcagcagaagggtgaggtgaaaaaagagccgaacatcgacgagctgaaacgaaagatggaacaggcgcgcctgaaaaaactgcgtggcgatctcgatcagctgattgaagcggatccgaagctgcgcgcgctgcgaccgcatctgaagattgacctggtgcaggaagggctgcgtatgcagattatcgacagccagaaccgcccgatgtttaaaaccgggagtgcggaagtcgaaccgtacatgcgggatattctgcgtgccattgcaccggtgctgaacggcattcctaaccgaatcagcctgtcaggccacacggatgatttcccgtacgccagtggggagaagggatacagcaactgggaactttctgccgaccgtgccaacgcctcgcgccgcgagctggtggcaggtgggcttgatgatggcaaggtactgcgcgtagtcggcatggccgcaaccatgcgcgtttccgaccgcgggccggatgatgccatcaaccgtcgtatcagtcttttagtgctgaaccagcaggcggagcaggccatcctgcatgaaaacgccgaaagtcagaatgagtcactggacgatttaaaacagcctggggccgttccttcggctgccgttccaacatcgccaccagccaatccgaggtgatagcgtgagcatggatattagcgatttttaccagacattctttgatgaagccgacgaattgttggccgatatggagcaacacttgctcgatttggtgcccgaagcaccggattccgagcagctcaatgccatcttccgtgcggcgcattccattaaaggcggagccggaacgtttggatttaccatcctgcaggaaacgacccatttaatggaaaacctgcttgatgaagcacgacgcggtgagatgcagctcaataccgacattatcaacctgtttttggaaaccaaagatattatgcaggaacagctcgacgcctataaaagttcggcagagcctgacgccgccagctttgaatacatctgcaatgcgctgcgccagctcgcgctggaagccaaaggtgaggttgccgcagccgtggttcctgccgcaaaactgagcgttgtggatacggttgccgcgcaggcgtctgcccctgccgacgcaccggcgggcaaactgcgcgtggtgctgtctcgcctgaaagagaatgaagttaacctgctggaagaagagctgggtaacctggcgaaattaagcaacgtggttaaaggcaaagacagcctggccgcgacgcttgatgacggtattggccaggacgatatcgtggcggtgctgtgctttgtgattgaagccgatcaaatcgccttcgaaaccgaaacggtcgcggttgacgttcctgcggctgtgaaagaggtggctgttgtcgctcaggctgccgcaccggctgtggcgcctgcggctccggcgctcaaggcggtgccaaaagaggctgctgcaccgggccgtggtgaaaaacctgccgcgcgctccagcgagtcgaccagcatccgtgtcgccgttgagaaggttgatcagctgattaacctggtgggcgaactggtgatcacccagtcgatgctggcgcaacgttcaaacgaactcgacccggtcacccacggggatttgattaccagcatgggccagctgcagcgtaacgcccgcgatctgcaggaatcggtcatgtccatccgtatgatgccgatggaatatgtcttcagccgcttcccgcgtctggttcgcgatctcgccagcaagctgaacaagcagattgaactgaccctgatgggcagctcaaccgaactggataaaagcctgatcgagcgcatcattgacccgttaacgcacctggtgcgtaacagcctcgaccacggtatcgaactgccggaaaaccgcattgccgccgggaaatccccggtcgggaatctgatcctgtctgcggaacatcagggcggaaacatctgcattgaagtgaccgatgacggcgcaggtctgaaccgcgagcgcatcctggcaaaagcgatttcgcagggaatggcggtcaatgaaaacatgaccgacgaagaagtgggcatgctgatcttcgccccgggcttctctaccgcagagcaggtgaccgacgtctccgggcgcggcgtgggcatggacgtggtgaaacgtaacatccaggagatgggcggccacgttgagatccagtccaaacagggttccggcacgaccattcgcatcctgctgccgctgacgctggcgatcctcgacggcatatccgtcaaagtggcggacgaagtctttatcctcccgctgaacgccgtgatggaatccctccagccgcgtgaggaagatctgcatccgctggcgggcggggagcgcgtgctcgaggttcgcggtgagtacctgccgctggtggaactgtggaaagtgttcgaagtggacggggcgaagacagaggctacgcagggtatcgtggtgatcctgcaaagcgcgggccgccgctacgcattgctggtcgatcagctgatcggtcagcaccaggtggtggtgaagaacctcgaaagcaactaccgcaaagtgccgggtatttctgccgccaccattctgggtgatggtagcgtggcgctgatcgtcgacgtgtcggcgcttcagggattaaatcgtgaacaacgtgtggcgtacacagccgcctgattaagtagaaggtaataacatgaccggtatgagtaatgtaacgaaactggcgggcgagccatcaggacaggaatttctggtattcactttaggcgatgaagagtacggcatcgatatcctgaaagtgcaggaaatccgtggttacgaccaggttacccgcatcgctaacacgcctgcgtttattaaaggtgtcaccaacctgcgtggcgtcattgtgcccatcgtggatctgcgcgtgaagttcagccagggcgacgttgactacaacgacaacaccgtggtgatcgtcctgaatctggggcagcgcgtggtggggatcgtggtggatggcgtgtctgacgtgctttccctgacctctgatcagattcgtcctgcgccagagtttgcggtcacgctgtcgaccgaatacctgaccggtctgggcgcgctcggcgagcgtatgctgattctggtgaacattgagaagctgctgaacagcgatgagatggcgctgctggatatcgccgcgagtcacgtagcctaaaacaaagccgccacccggcttttttacatcctgctccaccagcccggcttccgtggccacccatacgttaatgctcggggccttcttcgccgctggatatcgcggcgagtcacgtagcctaaaacaaagccgggtggcgctgacgcttacccggcctacgcgttcgagccatttgtaggccgggtaaggcgaagccgccacccggctttttcatgccattacgcttcctgctttaccagttcagcttcagcttccgcgtcccgcgcgccttcattctgcgacagcatggcggtcgcaataccattacccagaacgttaattgcggaacggcccatatccaggaagtggtcgatccccatcagcagcagaataccggccaccggaatgttaaagcttgggatcgtcgcggccagcaccaccagcgaggagcgcggtacgcccgcaatcccttttgaggccagcatcagggtcagcatcagcaccgtcacctcagagaagctcagatgaatgttgtacgcctgcgcaataaacatcgaggcgaaagagcagtacaccatcgaccccaccaggttgaaggagtagccaataggcagtacgaaagaagcgatgttgcgcgagcagccaaaatgctccagctgctccagcgttttagggtaggccgcttcagaactgctggtggtaaacgccaccagaaccggatctttcagcatgctgaccaggcggaacacctcttttttcagcaccatgtaacccacggccagcagcaccatgcaggtgagaagaatggcaacatagtagccgccaataaaggaggcatagttcaacagaatgcccaggccctgcgtggcgatgacggaggagattgccgcgaaaatggccagcggcgcaacgtacattacgtagcctgtgaccttcagcataatatgagaaaccacgtccagcgcggccaccagcggggcgttgaacttctgccccagcgacgcgccgccaatgccaaagaacattgagaacaccacaatctgcaggatctcattgttcgacatcgcccccgcgatgctggtcggaatggtgtgagacaggaacgctttcagcgtcatccccccaacggctaatccggtatccaccgcctcggtcgggacggtcaggttcagtccgctgcccggatgctccagcgtgacgataaacaggccgaccagaattgagagcacggatgagctgataaaccacaccatcgctttaccgcccacgcggccaatggtggaggtttcgcccagcttcataatgccgacggtgagcgtactgaagaccagcggcgcaatgaccattttgatcagtcgcaggaaaatatcggtcagaagggtaatattatccgaccaggctttgatggcatccgcagatgcatattcatgaattgctgcccctgaaagaatacccgccagcatgaatatcacgatgaagagtgtgagtttgtttgcacttgccacgaaaaaagaccctctatgcgcttcagatgtagcccgcaccgatacatataaattttttattacgacgcgggaaattattcggcacataaattgacgcaaagcgtagggggatacaactcctttttaagttttattaattttgttgttattgccctgacgatatattgtgatctgcatcacactttaatggatatattctctattgatagcatgaaaatgctgaaaaaaataatttaactctctgttatttaaggcaataagaagtcaataagacaaagtgcttatgcgttaaggggcaggtggtcgaagcgatatccgtaaactaaattctcaataacccccctcagaggaacattaagcggggctaacatcttgaacgacaaaaataaaacgtggcaagggaacggagacgtcttctggagggtggtaaatgaaaagaaaactccttttgatctgcgcaggcaccttactgactgcgacaacggtccatcaggcgctggccgtcaccagtagcggcaccatcggcgcgacgctgacgctcacgaacggttgtctgataaacggatcgcccacgcaaaacggcattaacttcgggacactggatttcggcacccatcccgcaacgttttccactctgaccacgcagctcaccggcgccagcggcggaaacaccttcactattcaatgtacgaccgccagctatacggtggcgatcaccggcaacaccaactccaccgcacccggcaccgttgtcggcaccccgggaacccctgcgcgctatctggttaacaccgccaacgcggcacagggcgtggcatacagcctgtacagcgacagcgggtttaacagcgtgattgccaataacaccgcgttgccgatcgcctctacggccggaggggtggacagttacaccctctacggacgtattaccggcggcggtaacagcgtgacggtcgtcccgggcacctacaccgacacgattaacgtcagcgtcacctattagtcctgcaccgccatgaaggcaactcttactggtctgcgcatatgcgcagagggacacgtgcagccttttttcgcgctgatcgtcggattgctgatgacgcctgcagcggaggcggtgacgtcacagtcctttaaggtgagcgcgacgattgttccgggatgcgcggtggccaccggcagcggaggggttctcgggacgctggattttggcacccataacggcgtcgagagcgcaccggtaagcaccagctttgtgccaaacggggcgttgtctatcgcctgcacgccgggcgtggcgctgagcatgagcattaatggcggacagaattattcaaccgttcgccgcatgaagcgctcgaacggcgccgacgtggtgggataccggctttacagcagcagctcgctggccgcgagcagcgaaattggcgtcaaccaggcgataccggtgacctatagcaacagcaataacatcgcgctgccgctttttggcgtggcgctactgaccggatttagcccggcaggaacgtattccgatcaactcaccgtgaccttgtcatggtaataaagggagagtgttgatgaagccagttttcagacctgtttgtctggcgggcgcgttgggaatggctgtggcaaccggtcaggcgcaggcggcagccaccattctgctctggcctatcgacccgtggcttgcggcagacgccaacgccacggagctgtggatccagaaccagggaaacagcgccaccacgatgcaggtgcgtattgtgcgctggaagcaggaggacggacacgaacgctacgccgcgcagcaggatgtggtcgccagcccgcccatcgtcacgattgacacaggcagcaagcagcttatccgtcttattaagcaggcccccgttcccgcaggcgtcgaacaggcctaccgcattattgtagatgaaattcctcagcctgatgccaaagcagaacccgccatcggcctcaagttgcagatgcgttactccattccgctgtttgtgtatggtcaggggatcccgacaataaaagagggggcgcatcacgcgctggtggagacccggaacctgagctggcgggtgacgcgagcggatgggcagccggtactggaggtccggaatcggggggatgtccatgtcaggctgagccaggtggcgctggagcagggagggcagaaacgcacggtcgcggagggattgctgggttacgtacttccccgcagcacccgcagctggccggtacccgcgggcgttcgtcagccagagcggatgagcgcgcagattaatgccagggacgcacaatggcagtcgacgcccgtcaactgaagccggcgatgatgatactgctttgcgtcagttccgcgacctgggctgagcccggcgatgacagccttccgccgccgccccaggcacaggcgatacatgatgaagcggtcttccagcttgccctcgtgctcaaccactacgataccggtctggtcgtgcccgtgacgcagcgcaaaggcactttctttatctccagcgctgacctgctgcgcgcgggactgcccccggaacatgttcctgccggagaggtgaatctctcatcgctttctcaggttcgggtggagtacgacagcgccggacagcgcctgctgctgaccgttccccgggactgggtcgcatcccgcgtgacgccgttcggcgcgcaaatggcgcaggccaaaccgcacttcgggcgcggcgcgctgctcaattacgatctctacaccaaccacacggagcatatcggcggacaggcgtccctctggcatgaattccgctatttcaatgagaacggctcgttttcctccaccggctatgcccgggaaaatttcaccggtaacgacggtcagcaggaagggtatgtccgctatgacacgaccctgctgttcacgaatgaggatgacgcaatgagctggagcgtcggggacgtgatcagcgatgccctgagctggagctccagcgtgcggatgggagggatcagcgtcgggcgagatttctccctgcgccctgacctggtgacgtggccgctgcccgaattcgcgggggaagcggcggtgcccacctcggtggatctctttatcaacgggtatcggtccggcccaacccagcttcagccgggccccttcaccctgaccaatctgccctatatcaacggcgccggggatgcggtactggtcacgacggatgcattagggcgccaggtcagcaccacgctgccgttttacgtctccagcgacctgcttaaaaaagggctaagcgacggcgccgtgacgctgggcagcctgcggcgtaattacggtatcaagaactttgactacggcccggcggcaggcagcggctcgtatcgctacggggtgacggactggctgacgctggagggtcatgccgaaggggcgcaggaactggcgctgggcggggccgggacggtgattaaactcggccagtttggcgtggtgaatacctcttactcgcaaagccgcatgcgcggggaggcgggcgggcaaatcaactggggttaccagtacagcaccagcgagttcagcgtggccacccagcacacgcgtcgggaccgcggctttggcaatctggccctctacgaccagcctacggtgtatgacgagaacgataaacccatcgccagcttcagccgcaatacggaccagtattctctgaccttcaacctgggacagtacggcaacatcggcgcagcctggattggcgtggagagttttgacagtcaaaaaaccgagctgcttaatctctcatggagccgtaatttgtggggcgcgagcagtatttacctcgccgggagccgggaccagcagcggggagactggacggtcgcgctgtcgctgcaggtgccgctgggggcacgcgacagcgccgcgttcaccgtcgaaaacaccccggatgcgggcaacacccagcgcattaactacaaccattccatgccgtctgacggcggctttagctggaacatggcctgggccaaccagtcaaaatccagtgactatcagcagggcacgctgggctggcgtaataacaatattgaactgcagggcggcggctacggcgaaagggacatgatgacctggtggggcgaggcgatgggcgcgattgttctgatggacggcgagctgttcgcggcgaataagatcaacgatgcgtttgtggtcatcagtaccgacggtcatccggacgtgcccgtcagctatgagaaccagcccgttggcaaaacgaataacaacggttacctgctggtcagcggggtgtcggcgtattacccggcaagctaccgcattgataccctgaacctgccggcggacacccggctgaaagagaccgagcggcgaattgcgattcggcgtcacagcggctatctggtcgatttcccgatggagcaggagagggtggcaagcgtcatcctccacgatgcgcgcggccaggcgctgccggtgggaagccaggtccgacgtgcctcgcgcagcaatgcggtggtggggtatgacggtattgcctggctggaaaaccttagcgatgtgaatccgctggaggtgatcgcgcctgacggaaaacgctgcaaggttaccctgaccgtgggagccaacccggagcacaagctgcaaacctacggtccgctggtgtgtcgggaggcgccatgaagcgtctgctgatgttgatgctgttgctgttctccggcggcggctgggcggcgtgtaccgtcagtacggttaatgcgtcgtttggcagcgtcacctcgttcgcgctcagcggaaccggggaggtggaaaccaccggcaggcttgttgtggcgtgtgataccgtgctcaacgttctgaccaacgattcggtgaccctgagctacaccgcggcgtcagtctcgggcaacagtcgcgcgaccatgaaacgtacggataatgccgccattacggacgtaatccccacccggctgtgcggattatcggcttgtgcgagcagcagcgaggtgcagataagtaaaacgtatacctggagcgggaataccttgctggggctgctggggacaaggcagtataatattccgctctattttcgcaccgtcgctggacaaaacgtcactgccggtccctaccaggtgcagttgaccttcagcatcagctacagcgtctgtgccttcggtgttggaagcctttgtacgaatgcccagacgggaacctcaacaaccaccatcctgttggatataaccgtcaccaacgactgtagcgccatgaccacgccggacgtcaacttcaacagcgcgccgctggtacaaagtttccccaccgtctcacaggcgattgccgtcacctgtaccaaaggcagtacgtataccatcggcattaacaacggtgctaacgcgctgaataacgtgcgccggatggtaagcggcagtaactacctcagttatgacatctataaagaagccacgggtaaccgctggggcggcagcggcagcgaacgctggaccagcgcgacgtcgtcgcaggtcagtgccgacggtttactgcgtacctacaactacaccgcgaaagtgctgactaatcaggccacgccacccgccggaacctacaccgatacgctgattgtcgacgtggctttctaaccccgcgcttttccctttctcaaatgtaaagttcctgttggctgtgccgataacaccgttaataaatctatgagaaggtgttgtatgttgaaccgtatccgcgttgtcacaatgcttatgatggtgctggtcattttcgcactacttcagcttatctccggcgggctttttttctcgtcattaaaacagaaccaggacagcttcgcggcctcgaacgatctccgcctgcagcagagtgaactcacctcaacgtgggatctgatgctgcaaacgcgtatcaacctgagccgctcgtccgcgcgcatgatgatggatcccaacaatcagcagagcagcgcgaaaaccgatctgcttaaaaatgcccgggcgacacttgcggatgccgcaaagcattacgaggcctttaagaaaatcaccccgcagcctgcgatggagcaggtgagccagaatatcgacgaaaaatacaacgcctaccatgccggtctggcagagctgattcagttcctggagagcggcaacatggacgcctatttcgcgcagccgacgcaggggatgcaaaacgccctcggcgcggcgctgggggaatatgcaaaggtcagtggcgatctgtatcactccgcgtttactgaaagccagaatgactaccgctttgcgaaatggcagatggcggtgctggcgctggcgctggtcattgtgctgatcgcggtctggtacggcattcgccatatcctgctgaaccctctcggtcgcgtcatcgcccacattcgtgacattgccggcggtgacctgaccaaaacgctgaccgtgtccgggcgcaatgagatcaccgagctggcaaccagcgttgaccatatgcagcgttcgcttatcgataccgtcgccaacgtgcgtagcggcacggatgccatctataccggcaccagcgaaattgcgatgggcaataacgacctctcatcgcgcactgaacagcaggcgtccgccctggaagagacggcggccagcatggagcagctcaccgcgaccgtgaagcagaacgccgataacgcccgccaggcgtctcagctggcggaaagcgcctccgagacggcgcagcgcggcggccgcgtggtggatggcgtggtgaaaaccatgcacgacatcgccgagagctccaagaaaatcgccgacatcatcagcgtcatcgacggcattgccttccagaccaacattctggcgctgaacgccgccgtggaagcggcgcgcgcgggcgaacagggacgcgggtttgccgtggtggccggggaagtgcgcaacctggccagccgcagcgccaacgcggcaaaagagatcaaatcgctgattgaagattccgtctcccgcgtcgataccggctccgtgctggtggaaagcgccggggagaccatgaatgacatcgtgaatgccgtcacccgcgtgacggacatcatgggtgaaatcgcctctgcgtctgatgagcagagtcgtggtatcgaccaggttgccctggcggtatcggaaatggatcgcgtgacacagcaaaacgccgccctggtgcaggagtccgctgcggcggccgctgcgctggaagaccaggcgagccgtctgaagatggccgtctcggcgtttcgtctcgcttcactcgctggaaacacggtcaccccgcaggcgacgtaccgcgcgccagccgctgaaacggctgccaaccgtacgcgtaccgcggcgaccggacaagatgaaaactgggaaacattttgactgacaattaaaccgcggctgcttgccgcttgatgggagcgtggatgttaaatcgtattcgtatctcgaccacactgtttttgattctgatcctttgcggtgtgttgcaggttggcagtaacgggttgtctttttgggcgtttcgcgatggctatcagaatttgcaggacgttgaggcgagtaatcagcagcgctccgcactggcacaaacccgtgccgtgctgttgcaggcaagcactgcgctgaacaaggcgggaaccttaaccgcgctaagttatccgccggatgacattaaggcgctgatggccaccgcgcgcgacagcctgaaacaggctgacgcacagtttaaggcctttgcggcacaggccaccggcagcgagaaagagaaagcgctgaaggccgccatgaagacccattttgaacagtggtacagcgatctcgaccatcaggcgacgtggcttgagaacaaccagctgtcggactttatgaccgcgccggttcaggcctcgcaggcggcgtttgacggcagctttgacgcatggcagcaggatatcaatcagtctgttctgcgcgccggtgaagcaagccgcaccagctatcacatgtcgggcgtcatcttcggcgtgatggtgattctggcgggcttgctgaccggcgccgcgctgctctggtcacgcaaaatgattgtgcagccgctggcgattatcagcagccacttcgacagcattgcgaaaggcgacctggcgcgtccggtggcggtgttcggcaaaaacgaaatttcggcgatctttgccagcctgaaggcgatgcagggatcgctgcgggaaacggtatccgacgtgcgtcagggaagttatgccatgcacaccgggatctctgagattgcggcgggtaacaacgatctctcatcccgcaccgagcagcaggcggcctcgctggcgcagacggcagccagtatggagcagctgaccgcgacggttagccagaacgccgataacgcgcgtcaggcatctgacctgtcaaaacaggcggcgatgacggcgaagaagggcggcgaccaggcgtcccatgtcgccagcaccatgcaggagatcgccaccagttcacagaaaattggtgacatcattagcgtgattgacggtatcgcgttccagaccaacatactggcgctgaatgctgccgttgaagcggcgcgtgcaggggagcaggggcgcgggtttgcggtggtggcgggtgaggtgcgtaacctggcgagccgcagcgccaacgcggcgaaagaaattaaggtgctgattgaagaatcggtgtcacgggttcagcaaggctctgccctggtggatacggcggcacaaaccatgcacgaaatcgtcacctccgtgacgcgggtgaacgacatcatgggcgagattgcctcggcgtcggatgaacagcgtcgcggcattgagcaggttgcccaggcggtgagccagatggatcaggtgacgcaacagaacgcctcgttagttgaggaagcggcagcggcaaccgatcagctggccagccaggcggatcgtctgaccgggctggtcgcggtatttaatgtgaaagagcacgttgaagcagtaacagaagtcgggcggtcgcaggccgtgccagttgtatcctgaatgtaattaagaaggcgctatgacatcaccaatgccccctgggcaaacgtcattattgttgcagatgacacagcgcctcgcgctgtccgacgcgcattttcgtcggatatgtcagttaatctaccagcgtgcggggatcgtgcttgcggatcataagcgggacatggtctacaaccgtctggtgcggcgcttgcgtacgctggggctggatgattttggtcgctatctgagcatgctcgaggcgaaccagaacagcgccgagtggcaggcttttattaactcgttaaccaccaacctgacggcgtttttccgggaggcccaccacttcccggtcctggccgagcatgcgcgccggcgcaccggggagtatcgcgtctggagtgcggccgcctcgacgggtgaagagccgtactcgctggcgatcacccttgccgatacgctggggatggcgccgggacgctggaaggtctacgccagcgatatcgataccgaagtgctggagaaggcgcgtaacggcgtttatcgccaggatgaactgaaaacgctgtcgccgcagcagctgcagcgttatttcatgcgcggcacgggcccgcatgaaggcctggtacgcgtacgccaggagctggcgaactgcgtcgaattcgcgcccgttaacctgctggataagcagtacaacgtgccggggccgttcgacgccattttttgccgtaacgtcatgatctattttgataaaacgacgcaacaggacattttgcgtcggtttgttccgttgctcaagcctgacggtttactgtttgccgggcactcggaaaacttcagcaacctcgtgcgtgagtttagcctgcgtgggcaaacggtatatgcgctgagtaaggaaaaagcatgagtaaaatcagggtattgtccgtcgatgattcagcgctgatgcgtcagatcatgactgaaattatcaatagccacagcgacatggagatggtggcaaccgcccccgatccgctcgtagcgcgggatttaattaaaaaatataaccccgacgtgctaacgctggatgtcgagatgccgcgcatggatggcatagatttcctcgaaaaattaatgcggctgcggcccatgccggtggtgatggtctcctccctgaccgggaaaggatcggaaatcaccctgcgcgcgctggagctgggggcggtggattttgtcaccaagccgcagctcggcattcgcgaggggatgctggcgtacagcgagatgatcgccgagaagatccgcaccgcgtcgcgggcaaagcttgccgcccacacgccgatggccgcgcctgcgaccctgaaggccggtcccttactcagttcggaaaaactgctggtcattggcgcgtcaaccggaggaacagaggcaattcgtcatgtactccagccattgccgctctcaagtccgggtattctgatcacgcagcatatgccgccaggctttacccgttcgttcgccgaacgcctgaacaagctgtgccagatcagcgtgaaagaggcggaagacggcgagcgcgtgctcccgggacatgcctatatcgcgccgggcgacaagcatatggaactggcgcgcagcggcgctaactatcaaatcaaaattcatgacggaccgccggtcaaccggcaccgtccgtcggtggatgtgctgtttcattcggtggcgaaacatgcggggcgcaacgccgttggggtgatcctgacggggatgggcaacgacggggccgccggaatgcttgcaatgcaccaggctggcgcctggacgattgcgcagaatgaagcaagttgtgtggtgttcggcatgccgcgcgaggccatcaatatgggtggcgtgagcgaagtggtcgatcttagccaggtaagccagcagatgctggcgaaaatcagtgccggacaggcaatacgtatttgactcaggagtattattttatggcggataaagagcttaagtttttggttgtggatgacttttccaccatgcgtcgcattgtgcgcaacctgctgaaagagctgggcttcaataacgttgaagaagcagaagacggcgtggatgcgctgaacaagctgcaggcgggcgggtttggttttgtgatctccgactggaacatgccaaacatggacggtctggaactgctgaaaaccattcgtgctgatgcgggtatggcgtccatgccggtgctgatggtcacggcagaagcgaaaaaagagaacatcattgccgctgcacaggcgggcgcaagcggctacgtggtgaagccattcacggcggcgaccctggaagagaagctcggtaagatcttcgagaaactcggcatgtgaggtgttggtgatgatgcaacctgctatgaaacccgttgaagaacactcgccgagcgacattatcgtccgcatcggcagcctgacgcgcatgttgcgtgacagcctgcgtgagctgggtctggatcaggcaattgccgaagcggcggaagcgattcctgatgcacgcgatcgtctggactacgtcgtgcagatgaccgctcaggccgcggaacgtgcgctgaacagcgttgaagcgtcacaaccgcaccaggatgcgatggaaaagggtgcgaaagcgctgaccaaacgctgggacgagtggtttgagaacccaatcgagctggcggatgcccgcgaactggtgaccgacacccgtcagttcctgggggatgtgcccggccacaccagcttcaccaacgcccaactgctggacatcatgatggcgcaggatttccaggacctgaccggtcaggtgatcaagcgcatgatggatgtgatccaggagattgagcgccagctgctgatggtgctgctggagaacatcccggaaccggcagcccgtccaaaacgcgagaacgaaagcctgctcaatggtccacagctcgacgccagcaaggcgggcgtggtggcaagccaggatcaggtggacgacctgctggacagcctcggcttctgatggtccattccgcttcagggggttaacgccgcctggggcggtttgcgacaaaatcaccgaaaagagcccgaataaacgggcttttcccgccattggatttccgctgcgctggcatgatacccgtgacgtaatgggctgagcgtgcacagtggcagaagagaacgacgacaaaacggaagcccccacaccccaccgactagaaaaggcgcgtgaggaagggcagatcccccgatcccgagaattgacctccctgctgatccttatcgtaggggtgtgcattatctggtggggcggggagtcgctcgcccgcaagctggcgggcatgctctcaaccggcctccgttttgaccacagtatggtcaacgatccgaatctgatcctcagccagattattcagctgattaaaggggccatggttgcgctgctgcccctcattaccggggttgtgctggtcgcgctggtctcgccggtgatgctcggcggtctggtcttcagcgccaaatcgctgcagccgaaattttccaaactcaacccgctgccgggtattgcgaaaatgttctctgcccagaccggggccgagctgctcaaagccattctcaaatcggtgctgatgggcagctccgcggggttttacctctggtaccactggccggaaatgatgcgtcttatcagcgaatcgccgctcaccgcgatgagcaacgcgctgaatctggtcgggctctgcgcgctgctggtggtgctcagcattatcccgatggtgggttttgacgtgatcttccagctctatacccatttcaagaagctgcggatgtcgcgtcaggatatccgtgacgaatataagcagatggaaggtgacccgcacgtgaaggggcgcatccgtcagatgcaacgtgccgccgcccgtcgccgcatgatggacgatgtgccaaaggccgacgtcatcgttaccaacccgacacactattccgttgcgctgcgctatgacgaaaacaaaatgagcgcgccgaaagtggtggcgaaaggggcggggctgatcgcgctgcgtatccgtgaaattggcaccgaacaccgcgtgccgatcctcgaagcccctccgctggcgcgtgccctgtaccgccatgcggatattggacaacagatcccgggacaactttacgccgccgtggcggaagtgctggcctgggtatggcagttgaagcgctggcgtctggccggtggtcaacggcctgtgaaacctgagaaccttccggtgcctgccgcgctggattttatgaacgagaaggacactgatggctaatctggtggcaatgttgcgcctgcccggcaacctgaaatcgacccaatggcagatcctggccgggccgattctgatcctgctaattctgtcgatgatggtactgccgctcccggcgttcatcctcgacctgcttttcactttcaatatcgcgctgtccattatggtgctgctggtggcgatgttcacccagcgtaccctggagttcgccgcgttcccgaccattctgctgtttaccaccctgctgcgactggcgctgaacgtggcgtccacgcgtatcatcctgatggaaggccacaccggggcggcagcggcaggtaaagtggtggaagcgttcggccacttcctggtgggcggtaatttcgctatcggtatcgtggtgttcgtcatcctcgtgatcatcaactttatggtcatcaccaagggtgcagggcgtattgcggaagtgggcgcgcgctttgtgctggacgggatgccgggcaagcagatggcgatcgacgccgacctgaacgccgggctaatcgccgaagatgaagccaaaaagcgccgtgcggaagtgacgcaggaagcggacttctacggctccatggacggtgcgagtaagtttgtgcgcggtgacgccatcgcgggcattctgatcatggtgattaacgtggtcggcggcctgctggtgggcgtattgcagcacgggatggacatgggccacgcggcggaaagctatacgctgctgaccatcggtgacggtctggtcgcgcagatcccggcgctggtgatctccactgcggcgggtgtcatcgtgacccgcgtgagcaccgatcaggacgttggcgagcagatggtgggccagctgttcagtaacccgcgcgtgatgctgctggccgcggcggtgctcgggttgctcggcctggtgccgggtatgccaaacctcgtcttcctgctgtttacggcggcgctgctgggccttgcctggtggatgcgtggccgtgaaaccaaaccggcagcggaacctgttccggtcaaaatgccggagaataatcaggccgtcgaagcgacctggaacgacgttcagctggaggattctctgggaatggaagtcgggtatcgcctgatcccgatggtcgatttccagcaggacggcgagctgctcggccgtatccgcagtatccgtaaaaaattcgcccaggatatgggcttcctgccgccggtggttcacatccgcgacaatatggacctgccgcccgcgcgctatcgcatcctgatgaaaggcgttgaaattggcagcggtgatgcctatccgggccgctggctggcgattaaccccggcaccgccgcaggcacgctgccgggcgagcaaaccatcgatccggcctttggtctggccgcgatctggattgaaagcgcgctgaaagagcaggcgcagatccagggttacacggttgttgaagccagtaccgtggtggcaacccaccttaaccacctgattgggcaattctcggcggagctgtttggccgtcaggaagcgcagcagcttctggaccgcgtcacgcaggagatgccgaagctgacggaagatctggttccgggggtgctgaccttaaccacgctgcacaaggtgctgcaaaacctgctcgacgagaaggtgccgatccgcgatatgcgcaccattctggaaacccttgccgaacacgcgccaatacaaagcgatccgcacgagctgacggcggtggtgcgcgtggcgctgggccgggccattacccagcagtggttcccgggaaccggggaagtgcaggttattggcctcgatacgccgcttgagcgtctgctgctgcaggctctgcagggcggcggcggcctggagccgggcctggcggatcgcctgctggcgcaaacccaggaggcgctggcgcgtcaggagatgctcggcgcgccgccggtgctgctggtgaaccacgcgctgcgtccgctgctgtcgcgcttcctgcgtcgcagcctgagccagctggtcgtgctgtcgaatctggagctgtcggataaccgtcatatccgcatgaccgcgacgattggaggaaaataatgcgtaaatggctttggctgttgttcttcccgctggcggcgcaggctgccgggggaggcacctggcaggcgagcagcataggggtggccctcagcaaccgcggtgttgccatgtcatctaacccgctggcgcctgctgaagaggtttccggtctgatgggtctggtggtctggaactaccggctgattggcccaacgccagcgggcctgcgggtgcgcctctgctctcagacgcgctgcacggaaatcgacggtgaaaatggaacaacgcaggcgttcaacggcgtgccggctattgaacctttgcgtttcatctgggaagtgccgggcgggggacgtttaatcccggcgctgaaggtgcagagtaattctgtcatcgtgaactaccgctgacggttgaattgtcaggactgcaaaaaaacaaaacccggcgattgccgggtttttggtattacatacgttctacggtttcgatacccagagtatccagacccagcttcagggtcttcgccgtcagctgcgccagcttcaggcggctgttgcggaccgattcattctccgcggagagaatagggcagtgttcgtagaagccggagaacagacccgccagatcgtacagataagcacacatcacgtgcggcgtgccgtcacgcgcgaccacggtcagcgtctcttcgaactgcagcagacgcgccgccagctgcgcttcacgatcttccgtgatggtcacggtggcattcgccagcacgctttcgtcgatattggctttgcggaagaccgacagcacgcgggtgtaagcgtactgcatgtatggcgcggtgttgccttcaaacgccagcatgttatcccagtcgaagatgtagtcggtggtacggttcttggacaggtccgcgtatttcaccgcgccgatacccacggcgttcgccagtttttccagctcgtcggccggcatgtccggattcttctcggccaccagacgacgggcgcgttccagcgcttcgtccagcaggtcggagagcttcacggtcccgcccgcgcgggttttgaacggcttaccgtctttacccagcatcatgccgaacatgtggtgttccagcggaacgctgtccggtacgtacccggctttacgcacgatggtccacgcctgcatcaggtgctggtgctgacgggagtcgatgtagtacagcacgcggtcggcatgcagcgtttcataacggtatttcgcacaggcgatatcggtcgtggtgtagaggtagccgccatcctttttctggatgatcacgcccatcggttcgccttccttgtttttgtactcatcaaggaacaccaccgttgcgccttcgctctccaccgccaggtttttcgctttcaggtccgccacaatgccgggcagcattgggttatacaggctttcacccatcacgtcgtcacgggtcagggtgacgttcagacggttataggtaagctggttctgcgacatggtgatgtcaaccagcttgcgccacatctcgaggaagtattgatcgccgccctgcagttttaccacgtagctgcgcgcgcgctcggcaaaggcttcatcttcgtcatagtgctttttggcttcgcgataaaacccttccaggtccgccagcgccatttcgcccgcattttcctgctgctgtttttccaggtaagcaatcagcatcccgaactgggtaccccagtcgcccacgtggttcgcgcggatcaccttgtgaccgaggaactcgagcgtacgcaccgcggcatcaccgatgatggtggagcgcaggtggccaacgtgcatctctttcgccacgttcggggcagagtagtcgatcacgacggtctgcgcttccggctgggaaacacccagacgatcggatttcagcgccgcgtcaacgtggcttgccaggaaggcaggctcgaggaagatgttgataaagcccgggccggcgatttcggttttgctggcaatgccggcgagatccagatgcgtcagtacctgctcagcgagctgtcgcggcggcatacccagttttttagccactgccatcacgccattagcctgatagtcgccaaactgtacttttgctgactgacgaacctgcggttcgcaatccgcaggcgcgcctgcggcaatcagtgcctgactgactttttcggagagaagagcctgaatattcacctggataccttacttttttgatgcgggctcacaaccacccgcgccagttagagaatttagggcgggagtatactgcaaatgccttctgccgtcagcatcgcggggcctgaagattgctcagaatccaggctaagaaggtgtgcataaacatgcagtcgtaaaaagccggattctgcggttggtcaaaacagagcaacagagtaaattagcggctttgcgacacgaaaagagagtgacttatggcgaactggcaatccattgacgaactgcatgatatttccgcagatttaccgcgcttcacccaggcgttcacagaacttgccacccgtctcggcctggatatcgcgccgcttgaggccgatcacatctctttgcgctgccatcagaatgctaccgcagagcgctggcgtcgcggatttgaacagtgcggcgagttactgtccgagaatatcattaacggtcgccccatctgcctgttcaggctgcgtgagccggtgaacgtggcccactggcaattcaccgtggttgaactgccgtggccgggcgagaagcgctatccgcacgaagggtgggagcacattgaaattgtcctgccgggtgagccggaaacattaaacgcgcgcgcgctggccctgttagctgacgaaggcttaagccagccggggatttttgtgaagaccagttcgcccaaaggcgaacgcgagcggttacccaacccgacgctggccgtcacggacgggcaggtcacggtgaagtttcatccctggaccattgagcagatcgttgccagtgaggcgcaagagatgtgagttcccgccgggactgaaaacagacggcatgtcatgatggtgcgtttggtggaatttaaggaggattacatggcgctgctggagatttgctgttacagcgtggagtgtgccgtcaccgcgcaaaattacggggctgaccgcattgagctgtgtgcggcacccaaagagggcgggctgacgccttcttacggcgtgctgaaggctgctcgtcaggccgtcacgattcccgttcacccgattattcgtccacgcggcggtgatttttgttacacggcgggcgagttcggtgccatgcttgatgatatcgccctcgtgcgcgacctggggttccccgggctggtcaccggcctgctggatgaagacggcaatatcgacctcccgcgcatgcgtcaggtcatgagcgccgcgcaggggctcgccgtcacttttcatcgcgcatttgatatgtgtaaagatccgcttcaggcctttgaaacgcttggagaacttggcgtggcgcgcattctgacatcgggtcaacagccgtccgctgaaaaaggactgcaattaattacggaactaaaagcacattccggtgttccaataataatggcgggtgcgggagtccgtgccagcaatctggaacggtttttaaacgccggggtagaagagctgcacagctcggcaggcaaatggatgccgtcacccatgcgttatcgcaatacaggattgtcaatgtcgacggatgctgaagcggatgagtattcacgctacggcgtagagggagagtcggttgcggaaatgaagtcgctgattgagcgccatcacgtgtagcaacgtaccgatttttaccgcgcatcatgtcgcccaatatgatgcttgcttgtaccaggcccctgcaaattacacaggggcctttttttctcctgcgcccggtagcgcttcgcttaccggacctggaaaatcgggagtaggccgggtaaggcgcagccgccacccggctaacaggctacggcttcgtcgcaatcaacaccgctcgcatcggggccggatagccttcgatggttttgctgtgatcggccgggtcgaggaactgctccagcgattcggtgatcatccactcggtccggcgctgctcttcgatagaggtcacgctgacatcggcaattcgcacatccacaaatccgcatttctccagccagttcttcagggccagcgcggaagggatgaagtaaacgttgcgcatctgcgcgtagcgatcgcccggtaccagaacggcatgttcatcgccttcgatcaccagcgtttccagcaccagctcgccgccgctgaccagctgatctttcagttgccacaggtgctccagtggggaacggcggtgatacaacacgcccatggagaacacggtatcaaaggctttcagtgcgggcagctgctcaatacccagcggcagcaggtgcgcgcgctggtcgttacccagcagcttacgtaccgcttcaaactgacacaggaacagctgcatcgggtcgataccgaccaccagatgcgcgcccgcgccaatcatgcgccacatgtgatagccgctaccgcagcccacgtccagaatggtgcgcccggtcaggtcggaaaggtgcggcagaacgcgatcccatttccagtctgagcgccattcggtattgatgttcacgccgtacagcgagaacggccctttacgccacggcatcaggttgcgcatcagcgtttcgatacggttgatctgccctggcggaagcggttcttcactctctgcggtgacgctgtgcaggagatccagacgatgcggggtcagttccggcagaaactccaccgcatttgaccactgctttaacaggccgtgctgctgatcccgctgccaggcggcaatctgcgcaggcagcgtctccagccagtgggagaggtgatttttggcaatcagctgatagaagttgctgaactcgatcatgcgggtttccccgctttcagcgccaccagagacccaaagttgaagcactggaaccacagttcgctatgctcaaatccggcctgacgcaggcgcgccttgtgggtttctacggagtccgtcagcatcacgttttcgagcatgctgcgcttctggctgatctccagctcgctgtagccgttcgcccgtttgaaatcgtggtgcatattgaacagcagctcgccaacctcggcatcttcgaagctgaatttctccgagagcaccagcgcgccgccaggattcagcccctgatagattttgtccagcagcagctggcggtcttccggcaccaggaactgcagggtgaaattcagcaccaccatcgaggcgttttggatctcaatctcacggatatcgccttccaccacgtcaaccggaacaggggctttgtaggcgtcaatatggcggcggcagcgttccaccatggccggagagttatccacggcaatgattcggcagccttcgtgatgaacgttacgacgtaccgacagcgttgccgcgccgagcgagcagcccaggtcatagacctgcgtgccgggttgaacgaagcgctcagccagcatgccgatcatagagataatattggaataaccgggaacagagcgctggatcatatccgggaagacttcggctacccgttcatcgaaggtccagtcgcccaggctggcgataggcgcggaaaaaagcgtgtcgcgatctgacataacgtaaaaatccgggaaaaataaagtggcgtattgtgcgctaatggagggagaaaaccaactcccacggcatataccacaggttagccagcaccatcagcaaaagcgaacaccaggttgcactcatgccggaacgacgccagcggattaagcggtggtgaaagccgtaataatgcatcaggcggccagcgataagcagcaggccacagatgtgcaccatccaggtttctgcgccattcatctccataaacagcagcaggatgagggccgcggggatgtattcgaccgcattgccgtgaatgcggatagcgctttgcagctcggaaaatccgccgtcaccgtaagaaacgcggtaaagcgttctgaggcgcacaacgtcaaatgaaaacttaatcagcagtaatgcacctaacaccgcgtacagcgcgctgaccatacaaactccctgtttttggcagatggcacttccctatgatagggggtgatatcagaaaagagaagattgttgtgggatggaaggggcgctgcccacggacggcaccgcagcctgcaaggcctgccacagagcatcgaccagttcgggggcctgggcaatatccggcgtgtgcaaaaagagatacggcgtggtggtgtgttcccacgaggccagtttttccagccagacggcgaacatcgcctggttttgcagcatgttatcgctgccgataaacctgaccattgggttcttcgcggtcacgatggcgtggaccggcactttcggttttttacgctgagcttcaacgatggcctcattatgcggtatcgcgctgtgcaccggacggctatcgaggatcacacggttaacggaacgctcaagcaggccgcggttgagcgctttttccgcttcgcctttcgcaaagaagtcctggtgtcgaacctccacgccgtaggtaaattcccggggcagggcatccaggaactgccagagcgcaggcaggtcgcgcggagcaaacgtggccggaagctgcagccagtactggccgatgcggtttgccagaggcgccatccggccaaagaattcgtcggtcaattcaccgcagtttcgcagcgcggcctggtgagaaatggtcgccggaaacttgaagcagaagcggaagtcgtcggtcgtttgctcccgccagcgcgcaacaatctcggctttcgggagcgcatagagggtagtgttaccctcgacgcagttgaagtgtcgggcatactcctcaaggctggtgatgccaaggcgcacccattccgggtgcgaccactggggcaggcccacatacatcataacgcgctaaggatctcgtccgtgctgcgcacgcgaccgatgcgcgggaagatgtgcgtcatgctgccctggtgctgttccgccgaggccgcgctacacgcatcttcggctatcaccagattaaagcccagctcccacgcgttgcgggcggtcgactccacgccgatgttggtggaaatgccgcacaggatgatcgtgtcaatgccgcgacggcggagctgcagctccagatcggtgccgtagaaggcgccccactgacgtttggtcacttcgatgtcgccgtcgcgtttgccgagcgataccgggtacgtccaccagttttccggcagggcgcgggcgggagtctgcgcatcaacgggctgttttaacgcttctgcgtaatccgcagaccagccgacgcgcaccatgacaaccggggcaccgctggcacggcatttttccgccaggcgggcggcgcggctgaccacatcgtccgcggtatgcgggccaccggcgaagggcaaaatgccttcctgtaaatcaatcaccacaagcgcggttttgctggcatcaagggttaacatcgttactcccgttaaatgaatcacttccacacaccatacgacgcgatggcctgttattggtcgcataattttgttaatttttgtgagaatgcgcaataagagtgcagcaaacgaccgcctggccgtggttcgctcttatcgtccggcggaatttccagtataatagccgccttttttcatccagttgtgacatacagaaagctgcgacatagtagcctgcataccaggcgacatttagcctgcggctaattaagggatatctcatgcgtacagaatattgcgggcagctgcgtcagtcccacgtcggacagcaggtcaccctgtgtggttgggtcaatcgtcgtcgtgatcttggtagccttatcttcatcgatatgcgcgaccgcgaaggtatcgttcaggtgttcttcgatccggatcgtgcagatgcgttgaagctggcctctgagctgcgtaatgagttctgcattcaggtcaccggcaccgtgcgtgcgcgtgacgagaaaaacgttaacgccgacatggcgacgggtgccattgaagtgctggcgtccgatctgacgatcatcaaccgtgctgaagcgctgccgctggactccaaccacgtcaacactgaagaagcgcgtctgaaataccgctatctggatctgcgtcgtccggagatggctcagcgcctgaaaacccgtgcgaaaatcaccagcctggtgcgtcgctttatggatgaccacggtttcctcgatatcgaaaccccgatgctgaccaaagccacgccggaaggcgcgcgagattacctggtgccatcccgcgtccataaaggcaaattctacgcgctgccacagtctccacagctgttcaaacagctgctgatgatgtccggcttcgatcgctactatcagatcgtgaaatgcttccgcgacgaagacctgcgtgctgaccgccagcctgaatttacccagatcgatgtggaaacctccttcatgaccgccgagcaggtgcgtgaggtgatggaagccctggtgcgtagcctgtggaatgacgtgaaaggcgttgagctgggcgatttcccaatcatgaccttcgcggaagccgagcgtcgctatggctctgacaaaccagacctgcgtaacccgatggagctggtggacgtagctgatctggttaaaaacgtggagttcgcggtcttcgcgggtccggctaacgacgccaaaggccgcgtggccgcgctgcgtgtaccgggcggagcggctctgagccgtaagcagatcgacgactacggcaacttcatcaagatctacggcgcgaaaggtctggcctatattaaagtgaccgagcgtgcgaagggtctggaaggtatcaccagcccggttgcgaaattcctgaacgcggacatcgtggaagcgatcctggagcgcaccggcgcgcaggacggcgacatgatcttcttcggtgcagataacaagaaagtcgttgcggatgcgatgggcgcgctgcgtctgaagctcggtaaagacctgaatctgaccgacgagagcaaatgggcgccgctgtgggttatcgacttcccaatgtttgaagacgacggtgaaggcggcctgaccgcgatgcaccacccgttcacctcgccgaaagacatgacggccgccgagctgaaagcggcaccggaagaggccgtcgccaacgcctacgatatggtcatcaacggctacgaagtgggcggtggttccgtgcgtattcacagcggtgaaatgcagcagaccgtgttcggcatcctgggcatcaacgagcaggagcagcgcgagaaattcggcttcctgctggacgcgctgaaatacggtacgcctccgcacgcgggtctggccttcggtcttgaccgtctgaccatgctgctgaccggcaccgataacatccgtgatgttatcgctttcccgaaaactactgctgcagcgtgtctgatgaccgaagcgccaagctttgccaacccggccgcactggctgagctgggcattgaggtggtgaagaaggaagagaaaaactgatatgacatataagctccccgtttcggtcctggtggtcatttatgcagaagacacgaagcgggtgctgatgttgcagcggcgcgatgaccctgaattctggcagtcggttaccggcagtctggaagagggggaaaccgcgccgcaggccgccgcgcgtgaagtaaaggaagaggtcgccattgacgttgcccgcgagcaactgaccctgaaggactgtcagcgcacggtggagttcgaaatttttagccatttacgtcatcgctacgcgccgggtaccgagcgcaatacggaatcgtggttctgtctcgcgctcccccatgaacgggagatcgtgtttaccgaacacctgacctaccgctgggtgaatgcggcggatgccgccgcactgaccaagtcgtggagcaaccggcaggcgattgaagaatttgtaattaacgctgcctgaaaaggcgcgctctttgaggatatttttatggcaggtcatagtaagtgggccaacaccaaacaccgcaaagcggcacaggatgccaagcgcggtaagatctttaccaaaatcattcgcgagctggtaaccgcagcgcgtctgggcggcggcgatccggcctctaacccacgtctgcgcgcggcggtggataaagcgctgtctaacaacatgacgcgtgacaccctgaaccgtgctatcgcacgtggcgtgggcggtgatgaagacgcgaacatggaaaccatcatttatgaaggttacggtcctggcggtacggcggtgatggttgagtgcctgtccgacaaccgtaaccgtaccgttgcggaagtgcgccacgcgttcaccaaaaccggtggcaacctgggcactgacggttctgttgcttacctgttcagcaaaaaaggcgtcatctccttcgagaaaggcgacgaagatgcgatcatggaagcggcgttggaagccggtgcggaagacgtagtgaccttcgacgacggcgctatcgatgtttataccgcctgggaagagatgggtgccgtgcgcgatgcgctggaagcggcgggcctgaaagcggacaacgctgaagtctccatgatcccgtccaccaaagcggatatggatgcagaaacggcaccaaaactgctgcgtctgatcgacatgctcgaagactgcgacgacgtgcaggaagtgtatcacaacggtgaaatctctgatgaggttgcagcgactctctgatgagagcgtgtaaacccgttacaggagacgcgtgatgtcgattattctcgggattgacccaggctcacgcgtcaccggttatggcgttatccgtcaggtgggacgccagttaacctacctgggcagtggctgtattcgcaccaaagtggacgatctgccgtcgcgcctgaagctcatctatgcgggcgtgtcggagatcatcacccagtttcagccggactatttcgccatcgagcaggtctttatggcgaaaaatgccgattcggcgctaaagctcggtcaggcgcgcggggtggccattgtcgctgcggtgaaccaggatttgccggtattcgaatacgcggcaaggcaggttaagcagacggtggtgggcatcggtagcgcggagaaaagtcaggtgcagcacatggtgcggaccctgctcaagctccctgcgaacccgcaggccgacgccgccgatgcgctggcgattgcgattacccactgtcacgtcagccagaacgcgatgcaaatgagcgaatcgcggctcaatctggcgcgaggcaggttacgataatgacaaatcaggctggatgtttatccagcctttttttattatgtcggcagttaatttcttccagaacgcaggagcgtcacgtgataggcagactcagaggcatcatcattgaaaaacaacccccgttagtgctgctggaagtgggtggcgtgggctatgaagtccatatgccgatgacctgcttctacgagctgccggacgcgggcaaagaggcgattgtctttacccagtttgtggtgcgtgaagatgctcagctgctgtacggcttcaacaacaaacaggaacgcaccctgttccgcgagctgattaaaaccaacggcgtcgggccgaagctggcgctggcgatcttatccggcatgtctgcaccacagtttgtgaatgccgttgagcgtgaagatcctgcggcgctgattaagcttcctggcatcggtaagaaaacggcagaacgcctgattgtcgagatgaaagaccgctttaaaggcctgcatggcgatctcttcacgccggcggccgatctggtgctgacctcgccaggtgcgcctgcgacggatgatgacgccgagcaggaagcggttgccgcgctggtggcgctgggctataaacctcaggaggccagccgcatggtaagtaaaattgccaaaccggacgccagcagtgaaaccctgattcgtgaagcgctgcgcgctgcattgtgaggtaaaggatgattgaagcagaccgcctggtttcggcaggcactgttcaggcagaggatgtggtggatcgcgcgattcgcccaaaactgcttgatgagtacattggccagccgcaggttcgttcccagatggagatttttatccaggcggcaaagctgcgcggcgatgcgctcgatcacctgctgatttttggcccgccgggtttaggcaaaaccacgctggcgaatatcgtcgctaatgaaatgggcgttaacctgcgcaccacctcaggcccggtgctggagaaggcgggcgatttggcggccatgctgaccaacctcgaaccgcatgacgtgctgtttatcgatgagatccaccgcctgtcaccggtggtggaagaggtgctctatccggcgatggaagattatcagctggatatcatgatcggtgaaggtccggctgcgcgctccatcaaaatcgatctgccgccgtttaccctgattggcgcaacgacgcgagccgggtcgttgacctctccactgcgcgaccgcttcggtatcgtgcagcgtctggagttttaccaggtggccgatctccagcacatcgttggccgcagcgcccgctatatggggctggagatgagcgaagagggggcgtttgaagtggcgaagcgttcccgcggtacgccgcgtatcgccaaccgcctgctgcgccgcgtgcgtgactttgctgaggtgaagcacaacggttcgatctccgctgagatcgccgcgcaggcgctggatatgctgaacgtcgatgccgaaggttttgactacatggaccgcaagctgctgctggcggtgctggacaagttctttggggggccggtcgggctggataacctggcggcagcaatcggggaagagcgtgaaaccattgaggacgtgcttgaaccgtatctgatccagcagggcttcctgcagcgcaccccgcgtgggcgtatggccacggtgcgggcgtggaatcatttcggcattacgccaccggcaatgccgtaagcagcgataatttatagccccggtaagcgaagcgccaccggggacatacccgctactgcgcggtcttcttcatcatactgaagataaacagcaccgccgcactcagcaccacggacggccccgcaggcgtgtcatagaacgccgagaaggttagcccacccgttaccgcaatcatcccgataattacggcgacaccggccatctgctccggcgtacgggcaaaacgacgcgccgtagccgcagggatgatcagcagcgaggtgataatcagcgcgccgacgaacttcatcgccacaccaatggttaacgccgtcaccagcatcagcagcagcttcacgcgctgcagcttcacgccgtcgacaaatgccagatccgggctgacggtcatcgccagtaaattacgccattgccagagcaaaatccccaggactacaaccacgccgatagcaatggcgatcagatcgtccggcgtcacggccagcaggtcaccgaacaggtaggccatcagatccacgcggatattggacatcaggctgaccaccaccaggcccagcgacagggcactgtgcgccatgatgccaagcagggtatcgatggcgaggtgagggcgcttttccagccagaccagaccggccgccagcagcagcgtgaccacaatcaccgcatagaacgggttgacgttcagcagcaggccaaaagccacgcccagcagggacgcgtgcgccagggtatcgccgaagtaagacattctgcgccacaccataaacgagccgagtggacccgcggcgcaggcaagcataatcccggccagccagccgggcagtaacagttcaatcatgagtgtccatttccccgacgcagaacgattcgtccctgcaaatcatggcggtgattatgatgatggcgatagatgccgagctgttcagcgccgcgagggccgaacatggagataaattccgggtgcatggagaccacttctggcgtgccggagcagcagatatggtggttgagacacagcacttcatcagtttttgccatcaccagatgcaggtcgtgggataccatcagtaccgcgcagttcagttcctgacgcagctggtcaataagatcgtacagcgcgacctggccgttgacgtctacaccctgagtcggctcatccagcaccagcagctgcgggctgctgagcaacgcacgggcaagtaatacgcgctgcgtttcaccgccggacagtttttgcagcggcgcatcgacaagatggcctgcctgcacgcgcttcagcgccgggagaatatcggctttacgcgtgccggggcgcaggcgcaggaaacggctcaccgtcagcggcagcgtggcgtcgaggtgaagcttttgcggcacatagccgatacgcaatttttcctcacgcttgatcacgccttcatcgggtgcgaccagacccagcaccacgcgaaccagggtggatttgcctgcgccattggggccgagcagcgtcagaattttgccgggcttcagatcgagcgacacgtcagaaaggacgcggcgctggccaaatgagaccgaaatattttcaagagaaaccaatgtcgtcatgtcattttaagcttgaagaagtcaacgaatgttataatatcacattccacgcattcactacgatgattagtcgcattatgttacataaaaatacgcttcttttcgcagcattatccgctgccctttggggcacaaccgcacaagatgttaacgctgcggttgtcgcttcgcttaaaccactcgggtttatcgcgtctgccattgctgacggggtaacagaaacccaggttctgctcccggatggtgcatccgagcatgactactccctgcgcccttcagacgtaaaacgcttacaaaacgcggacttagttgtctggattggtccggaaatggaagcgtttatgcagaagtcagcaaaacaggtggcgggcgaaaaacaggtcgcgattgccgccctcccaggcgtgaaaccgttactcatgaaagggacggatgacgacggcgatgaacatgaccatcatgctgccgacggtgaaaaaggtgatggagatcaccatcacggcgagtacaacatgcatctttggttatccccagagatagcgcggctttcagcggttgcaatccatgacaaattagtggaacttatgccgcaaagtcgagccaaactagacgccaacctgaaagattttgaggcacaattagccgcaaccgataagcaggtaggtaatgagctcgcaccgttgaaaggaaaagggtatttcgtttttcatgacgcctacggctattacgaaaaacactacggtttgaccccgctggggcactttaccgtcaaccctgaaattcaacctggtgcgcagcgtttacatgaaatcagaacacagctggttgagcaaaaagcgacatgcgtttttgctgagccacagttcaggccagcggtcgtagaagccgtggccagggggacatccgtgcgcatggggacccttgacccgctaggaacgaatatccagttgagcaaagcgagctattcgcagttcctcagccaactggcgaaccagtatgcgagctgcctgaaaggagattaacgaggaagtgaatacgtgcaacagatagcccgctctgtcgccctggcatttaacaatctgcctcgaccccaccgcgtcatgctggggtcgcttacagtactcaccttagcggtcgccgtctggcggccctatgtttaccacccgagttctgcccctatcatcaaaaccatcgagcttgaaaagagcgaaatccgctctttgctgcctgaagccagtgagcctatcgaccagtcggctcaggaagatgaagccattccacaggatgaactggacgataaaaccgagaacgaagcgggtatccacgaatatgtagtttctaccggtgacacgctgagcagcgtgctgaaccagtacggcatcgacatgggcaatatcagccagctggcggcggcagataaagatcttcgcaacctgaaaattgggcaacagctctcctggacgttaacggccgatggcgatctccagcgtctgacctgggaaatgtcccgccgtgaaacccgcacctacgatcgcacggcaaccggtttcaaaatgaccagcgaaatgcagaagggcgactgggtcaacagcgttctcaaaggcaccgtgggcgcaagctttgtctccagcgcgcgcgacgcagggttgaccagcgctgaaatcagttcggtgatcaaagccatgcagtggcagatggatttccgcaagctgaaaaaaggcgatgagttttccgtcctgatgtcccgcgaaatgctggacggcaagcgcgagcaaagccagctgctgggcgtgcgtctgcgctccgaaggcaaagattactacgcgatccgtgccgaagacggcaagttctacgaccgcaccggtacgggccttgcaaagggcttcctgcgcttcccgacggcgaaacagttccgcgtctcctccaactttaacccgcgtcgtctgaacccggtcaccggacgcgtcgcaccgcaccgtggcgttgactttgctatgccgcagggcacaccggtactcgcggttggggatggcgaagtggtggtggccaaacgtagcggcgcagccggatattatgttgcggtacgtcatggtcgcacgtatacgacccgctatatgcacctgcgtaagctgctggttaaaccaggacagaaggtgaagcgtggtgaccgtattgcgatctccggtaataccggtcgctctaccggcccgcacctgcactacgaagtgtggatcaaccagcaagccgtgaacccgctgacggcgaaactgccgcgcaccgaaggcctgacgggtaaagatcgtacggattacctggcgcaggtgaaagaggtgttgccgcagctgagcttagactaagccctctgtttttgttaaaaaagccggcgcaccctgacgccggctttttcttttgtgcgcggacgactgcctcgctacactatctgaattaattttgcgtcatcagaccctggatccagcatggaaacacaaaaaaacaatattgaatacattcctgagtttgaaaaatccttccgccatccgcgcaactggggcgcctggctcggtgtttacgcctttgcggggatagcgttgctgccggcttccgtccgcgatcctgtcctgggtaaaattggccgtcttgccgggcgcttaggcaagagtgcccgccgtcgcgcgcagatcaatctctattactgttttcctgaaaagagcgacgccgagcgcgaggcaatcattgatgagatgtataccaccgcaccgcaggccatggcgatgatggcggagctggcgctgaaagggccggagaaaattgtcgatcgcgttgactggaaagggctggatatcattgaggagatgcaccgcaatgacgagaaagtcattttccttgtcccacacggctggggcgttgatattccggcgatgctgatggcctctcagggccagaagatggcggcaatgttccataaccagggcaataaaatcttcgactttgtctggaatacggtgcgtcgtcgttttggcggacgcctgcatgcgcgcaacgatggcattaagccgttcattcagtcggtacgccaggggtactggggctactatctgccggatcaggaccacggtcccgagcacagcgagtttgtcgatttctttgcgacctataaagcgacgctccctgcgattggccgcctgatgaaagtgtgtcgtgcccgcgtgatcccgctattcccggtctatgacggcaaaacgcatcgcctgagcattgaggttcgtccgccgatggacgatctgctgaccgctgacgaccacaccattgcccgtcggatgaacgaagaggtggagatcctggtagggccccatgccgagcaatacacgtggatcctgaagctgcttaaaacgcgtaagccgggtgaaaaagagccgtataaacgcaaagagctttatccaacgaaataaaaaaagccctctccatctggagagggctttttaacagagacgttattactcgacggtcataacgcgcgtggtgttggttgagccgatggtgctcatcacatcgccctgggtcacaatgacgatatcaccagagaccagatagcctttgtcgcgcagcaggtttacggcatcgtgcgccgcggccacgccgtcattggtgctgtcgaagtgtaccggcgtcacgccgcggtacagcgccgtcaggttcagcgtacgttcgtgacgggacatggcgaagatcggcagacccgagctgatacgagaggtcattagcgcggtgcggccagattcggtcatagtgatgatcgcggtaacgcccttcagatggtttgccgcatacattgcagacatcgcaatcgcttcttcaacgttgtcgaactgcacgtccagacggtgtttagagacgttgatgcttgggatcttttcagcacccaggcaaacacgtgccatggcggccacggtttctgccggatactggcccgcagcggtttccgcagagagcattaccgcatcggtaccgtccagcacggcgttggccacgtccatcacttctgcacgggttggcatcgggttggtgatcatcgattccatcatctgagtggcggtgatcaccgcgcggttcagctgacgtgcgcgacgaatcagggctttctgaatccccaccagctcagggtcgccgatttccacacccaggtcgccacgcgcaaccatcaccacgtcagaggcaaggatcacgtcgtccatagcatcctgatcgcaaacggcttccgcacgctcaactttggcgacgattttggcatcgcagcctgcatcacgcgccagacgacgcgcatagttaagatcttcgccgcagcgcgggaaggagacagccaggtagtcaacaccgatcagcgcagcagtcacaatatccgctttatctttatcagtaagcgcttccgcagagaggccgccgcccagcttgttgatgcctttattgttggagagcgggccgccgacggtgacttcggtgaacactttcatgccctgaacttccagcactttcagctgcacgcgaccatcgtcaagcagcaggatatcgccaggtacgacgtcagccgggaggcctttatagtcgataccgactttctctttatcgccttcgcctttgcccaggttggcatccagcaggaatttgtcgccgatattgaggaaaactttaccctctttaaaggtcgaaacgcggattttaggaccctgcaaatcgccgaggatcgcaacgtgacggcccagtttagctgcgatttcacgcactttatcggcacgtaatttatggtcttctggcgtaccgtgagagaagttcatacgcaccacgttggcgccagcggcgataattttctcgagattattatcgcgatcggtggccgggcctaaggtggttacgatcttggttctgcgaagccttctggacatgtaatactccgttgactgaaacaactttggtgttgcgtgaacattgaatcggccttcatctgctgcaaggcagtggagaggggaccgaatgccgtaaatcgttacttcgtcattattcgtgacgtcttcgttatcaactatcgaacatcgctctttataagcaattctttatcaaaacgcgattccttcagcgcttccttgacccgcttcaagttatcccggaattttgccccccggcgtaaggtaaaaccggtcgccagcacgtcaatcacggtgagctgagccagtcgggagaccattggcatataaatgtcggtgtcttccggcacgtcgagagtgatcgccagcgtcgcctcacgggccagcggtgtgcccgccgtggtcagcgcaatcaccatggcatcgttttcacgggccagctgcgccagttctacctgactcttagtgcggccagtatgcgaaatcagtaccacgacgtcatcttcactgcaattcatacagctcatgcgttgcaggacaatgtcatcggaataaatcaccgggacgttaaagcggaaaaatttgttcatggcgtcatgcgcgacggccgccgacgacccgagcccaaagaaggcaattcgcttggcctgggtgagtaaatccactgcgcgattcacggaactcatgtccagagactgacggacgtggtcaagcgaagccatggccgactcaaaaattttcgcggtataggcatcaacgctgtcgtcttcatccacattacgattaacataaggggtgccgttagccagactttgtgccagatgcagtttaaaatcaggaaagccgcgcgtttccaggctgcggcagaagcgattgaccgtgggttcgctaacacccgcttcctgtgccagagcggcgatgcttgaatgaatcgcctgagcgggagaggcgagaatgacctcggccacttttcgctcggatttgctaaggtgttccagttgaaactggattttttccagcatgttcatgttaacaggacgctcgtgggtgtaaacgatttcattaattgatgaaatcgtgattcgatttagccgatattacccctgtggcttccattaagggtaacaatcgacgagataatgttgttgttttttttcattacttgatcgatgtcgggttttgctatgaccctgttgcgcaaagaaacgacggttgttgcgtcattaagccgtcgaaatcatccgaagggtgaaaaatcgcggtatcgcacgcgacgataagagctaatggtttcgggaatgacgtaaaagcagtacagtgcattgtaataaaattacaacgatacctggcagaagcaccaggtgatccaactgaggagaatgacatggcggtaacgcaaacagcccaggcatgtgacctggtcattttcggcgcgaaaggcgatcttgcacgccgaaaattgctgccttccctgtatcaactggagaaagcgggccaaattcatccggatacgcgtatcctgggtgttgggcgcgccgactgggacaaggacgcttataccaaagtcgtccgcgaggcgctcgaaactttcatgaaggaaaaaattgatgaaagtttgtgggataccctgagcggtcgtctcgatttctgcaaccttgacgtgaatgacgtcagcgcattcgctcgcttgggcgcgatgctggatcagaaaaaccgtgtcaccattaactatttcgccatgccgccaagcaccttcggcgccatctgcaaaggcctgggcgaagccaaactgaacgccaaaccggcgcgcgtcgtgatggagaagccgctgggtacgtccctggcaacctcgcgtgaaatcaacgaccaggtgggcgagttctttgaagagtgccaggtctaccgtatcgaccattatctcggtaaagagacggtgctgaacctgctggcgctgcgttttgctaactccctgtttgtaaataactgggacaaccgcactatcgaccacgtggaaatcaccgtggcggaagaggtagggattgaaggtcgctggggttactttgaccaggccggtcagatgcgcgacatgatccagaaccacctgctgcagattttgtgcatgattgccatgtctccaccgtctgacctgacggcggacagcatccgtgacgccaaagtgaaagtgctgaagtcgctgcgccgcatcgaccgctccaacgtgcgcgagaaaaccgttcgcggccagtacaccgccgggtttgcgcaaggcaaaaaggtgcctggctacctggaagaagagggcgcgaacaagtccagcaacaccgagacgttcgtggccatccgcgtggacatcgacgactggcgctgggcgggggttccgttctacctgcgcaccggtaagcgtctgcctgcgaaatgttccgaagtggtagtctactttaagaacccggaactgaacctgttcaaagagtcctggcaggagctgccgcagaacaagctgaccattcgtctgcagccggacgagggcgtggatatccagatcctgaacaaagtgccgggcctggatcataaacacaacctgcagaccaccaagctggatctgagctactccgaaaccttcaaccagacacacctggccgatgcttacgagcgtctgctgctggaaaccatgcgcggtatccaggcgctgttcgtgcgtcgcgatgaggtggaagaggcgtggaaatgggtcgactccatcaccgaagcctgggctgccgatcaggatgcgccaaaaccgtatcaggcgggcacatggggacctgtcgcgtcggtggcaatgatcacccgtgatggccgctcctggaacgagtttgagtaagataatccgctagcccgaaagtgttattttaccggtaacatgatctaacacagctcgtggcacaattttcaacttttaagctccgcgtggattcacccgcggagctttttttattacactgccggaagtgattttgcccctgagctccggacagcaagcgtttcagcgttgttaacaactgccagcgactttgtaaactcccgagcccggacagataaatgagaggagcttttatgaatccgacattgttacgcgtaacaaagcgcattattgagcgctcgaaagagacccgttcggcctacctcgcccggattgaacaggcgaagagcaacaccgttcaccgctcccagctggcctgcggtaacctggcgcacggcttcgccgcctgccagcctgacgataaagcgtcgctgaaaagcatgttgcgtaacaatatcgccatcattaccgcttataacgatatgctttccgcgcaccagccctatgaggtctacccggatatcatccgtaaagcgctgcacagcgtgaatgcggtcggccaggtggcgggtggggtacccgccatgtgcgacggcgtgacgcagggtcaggacggtatggagctctccctgctgagccgtgaagtcattgccatgtccgcggcggtgggcctgtcacacaacatgtttgatggcgcgctctatctcggcgtatgcgacaagattgttccgggcctggtgatggccgcgctgtcgtttggtcatctgcctgcgatcttcgtgccgtcgggcccaatggcaagcggcctgccgaacaaagaaaaagtgcgcattcgccagctgtacgcggaaggaaaagcagatcgtcaggcgctgctggaagcggaagctgcatcctaccacgcgccgggcacctgtacgttctacggtaccgcgaacacgaaccagatggtggtggagtttatggggatgcagcttccgggctcgtcctttatccagccggatgcaccgctgcgcaaggcgctgaccgaggccgcggcccgtcaggtcacgcgtctgaccggaaacggcaacgaatggatgccgatgggcaaaatggtcgacgaaaaagttatcgtcaacgggattgtcgcgctgctggccaccggcggttcgaccaaccacaccatgcacctggtggccatggcgcgtgcggcgggcattctgattaactgggatgacttctccgagatctcttccgtggtgccgttgatggcgcgcctgtatccaaacggtccggctgacatcaaccacttccaggccgcaggcggcgtaccgctgctcatgcgcgagctgctgaagggcggtctgctgcatgaagatgttaacaccgtagcgggctttggcctgcagcgctacacccaggagccatggctgaacaacggcgagctggactggcgcgaaggggcgaccgcatctcttgatgcgcaggttatcgccaccatcgacaaaccgttctctcctcacggtggcacaaaggtgctgagcggtaacctcggtcgcgcggtaatgaagacctctgccgtaccggaagagaaccagattatcgaagcgccagcggtggtatttgaaagccagcacgacgtattacctgcctttgacgccggtctgctcgacaaagactgcgtggtagtggtgcgtcatcaggggcctaaagccaacgggatgccagaattacataaacttatgccaccacttggtgtattattggaccgccgtttcaaaattgcactggtgaccgatggacgcctctctggcgcctcaggtaaagtgccatcagctatccacgtgacgccggaagcgtacgacggtggcctgctggcgaaagtgcgtgacggtgacatgatccgcgttaacggtcagacaggcgagttaaccctgctggtggatgacgccgagctggcggcacgtcagccccatattcctgacctgagcgcgtcgcgcgtgggaacagggcgcgaaatgtttggcgcactgcgtgagaacctctccggtgctgagcagggcgcaacctgtattacgttttaagacgacttgatttaacgatctggcgagagaagactctgatgaaaaactggaaaacaagtgcagaagcaatcctgaccactggccctgtcgtgccggttatcgtggtaaacaagctggagcacgctgtaccgatggcgaaagcgctggttgcgggcggcgttcgcgttctggaagtgaccctgcgtaccgcctgcgcgatggatgccattcgcgcgattgctaaagaagtgccggacgccattatcggtgcgggtaccgtaacgaacgcaaaacagctggctgaagtgaccgaagcgggcgcacagtttgccatcagcccgggcctgaccgagtcgctgctgaaagccgccaccgaaggcaccattccgctgatcccgggcattagcaccgtttctgaactgatgctgggcatggactacggtctgaaagagttcaaattcttcccggcggaagcgaacggcggcaccaaagcgctgcaggccattgccggtccattctctcaggtacgcttctgcccgacgggcggtatctctcctgccaactaccgtgactacctggcgctgaaaagcgtgctgtgcatcggtggctcatggctggttccggcggatgcgctggaagcgggcgactgggatcgcatcaccaaactggctcgcgaagcggtagaaggcgcgaagcagtaagtcattcgccgcatgaaaaacgggcctttcggcccgtttttttatcccgttaccttaacgcttgctgcggccgctttcgctctcgccacggcgtcgtcaacgttatctcctgtggctaacgccacgccaagacgacgggttccgtcgatctccggcttgccgaacaaacggacctgcaacccggcacccaccgccgcgtcgacgttatcaaacgtaacgttctggctggttaactgcggcaggatcaccgccgaggcggccgggccgtactgacggataccgccgacgggcaggccgaggaaggcgcgcacgtgcagggcgaactcggagagatcctgcgaaatcagcgtgaccatgccggtgtcatgcgggcgaggggagacttcgctgaagatcacctcatcgccgcacacaaacagctccacgccaaacaggccatagccgcccagcgccaggacggttttacgggcgatcgcctgcgcacgctccagcgccagggcactcatctgctgcggctgccaggattcgcggtaatcgccatcttcctggcggtggccaatcgggtcgcagaaatggacgccgtcaacggcgctgacggtcagcagggtgatctcgaaatcaaacttcaccaccccttcaacgatcacgcgaccggcgcctgcgcggccaccctgctgggcgtactcccacgccttgtccaccgtgctgctgccgcggataaagctctgtcctttaccggaggagctcatcaccggcttaacgatgcacgggtacccaatctcctcaacggcctgcaggaatgcggctttatcgccagcaaaacgatagctcgacgtgggcaacccgagctcttctgccgccagacgacgaatgccttcgcggttcatggtcagctttgcggctttcgcgcagggcaccacgcgctggccttcctgctcaagcgcaatcagcgtgtcggtggcgatggcttcaatttccggcacgacaaaatcaggcttctcgcgtgaaatcagctcacgaagggcatcgccgtccagcatgttaatcacataagaacgatgggcgacgtgcatggcgggtgcatcggcgtagcggtctacggcaatgacttccacgcctaaacgctggcactcaatggcgacctcttttcccagctcgcccgatcccaacagcatcactcgcgtcgccgcaggtcgcagcgcggttcctaaacgaatcataacaatccccctgaaaaagttgcgggcagtataaacgaaaacgtttgcgtctgtcttgtgcacggccaggtgaggggagaagaaatttgcgcttctttagcccgtccagacatttcctgacgcctgctcgcttacgctgtggaacatgttcaccgttaagtgaggaaaatcatgtcttgctggctaaatcaattgcaatcactgttagggcagaaaacgtcgtcttcaggcgagcgggatctcagcaaactgctggtgcccggggcgctcggcgggctggcaggcctgctggtcgcgaataaatcctcgcgcaagctgctggcaaagtacgggacaggcgcgctgctggccggtgggggcgccattgcgggcaccgtcctgtggaataaatacaaggacagggtccggaccgcgcacagcgatgaaccgcactacggcgagcatacctcgccgctggatctgcgcaccgaaaggctcattcttgcgctggtttttgccgcgaaaagtgacggacatatcgacgataaggaacggctggcgatcgaactgcagctgcgcgaagccggcgtcgaagagaagggcagagcgctggtggcgcaggccatcgaacagcccctggatccgcagcgtctggcgcaaagcgtgaaaaatgaggaagaggcgcttgaactctatttcctcagctgtgccgccatcgatatcgatcactttatggagcggagctacctgaatgcgcttggcgacgcgctgaagatcccgcaggacgtgcgtgagggcattgagcgggatattcgggaacaaaaacaggcgttacagggatagttctcgccgttgcgaccctgtttcgcttgcatcatgcgtgggttttgccaaccttatagggtgtaaaacgaaaaagaatgacgacatgccaccgaaagcccgacgtataccttatgcgatcaccacgcatggcgatacgcgtatagacaactattactggctacgggacgattcgcgctcccggccagaggtgctcgactacctgcacgaggaaaacgactacggccgcaaggtcatgtccagccagcagacgcttcaggaccagctgctgaatgaaatggtgcagcgtattccccagcgcgatatctccgcgccctggaccaaaaatggctatcgctatcgccatatttatgagcccggcaacgagtatcccatctaccagcgtcagtcggtcctgagcgccgaatgggatgcgtgggatattctgctggatgccaaccaacgcgcggcccacagcgagttttatactctgggcggcatgtccatttcgccggataacgcggtgatggcgctggcggaggattatctctcccgtcgccagtacggcctgcgttttcgcaacctggacaccggcaactggtatccggaaatgctggaaaacgtctccccggattttgtctgggcgaatgattccgagacggtgtactacgtcaaaaagcacgcctctacgctgctgccctatcaggtatggcggcataccatcggaacggactccgctgacgacgagctggtctacgaagagaaagacgaaacgttttatgtcagcctgcataaaacctcttcgcgccactatgtcattatcttcctggccagcgccacgacgtcggaagtcctgctgctggatgccgaattgccggacgcccagccgctctgttttctgccgcgccgaaaggatcatgagtacagcctggatcacttccagcacagcttttatctgcgctcgaatcgcgagggtaaaaactttggcctctataaaaccaaagtacgcgatgagcgcaagtgggaggtgcttatccccgcgcgggatcaggtgatgctggaagggtttaccctgttcaccgactggctggtggtggaggagcgccagcgcgggctgaccagcatccggcaaatcaaccgcaaaacgcgggaagtggtggggatcgcgttcgacgacccggcctatgtgacgtggattgggttcaatcccgaacccgaatcatcgcggctgcgctacggctactcatccatgaccacaccggacaccctgtttgagctggacatggataccgggcagcgtcaggtaattaagcagaccgaggttaaagggtttgagtccgaaaactaccgcagcgagcacctgtgggtcaccgcccgggatggcgtcgaggtccccgtctcgcttgtctatcacaaagcccatttccagaaaggcaaaaacccgattctggtgtacggctacggctcctacggctccagcatggatgctgatttcagcagcagccgtttaagcctgctcgaccgcggctttgttttcgccatcgcccatattcgcggcggcggtgagctggggcagcactggtatgaggacgggaaattcctgaaaaagaaaaacaccttcaatgactacctcgacgtctgcgatgcgctgattgatcagggctatggcgatcctaagctctgctttggcatgggcggcagcgcgggtggtatgctaatgggggcggttatcaaccagcgtcctgaacgctttaaggggattgtcgcgcaggtgccgtttgtcgatgtggtgacgaccatgcttgatgaatccattccgctgacgaccggggagtttgaagagtgggggaatccgcaggatgagatttactaccgctatatgaaaacgtacagcccttacgataacgtcgaggcgaaagcctatccccacatgctggtcaccaccggcctgcatgactctcaggtgcagtactgggagccggcaaaatgggtggcgaaactgcgggagctgaaaaccgacgacaacctgctgctgctgtgtaccgacatggattccggacacggcgggaaatcgggacgatttaaatcgtatgaaggggtggcgctggagtatgccttcctgattggcctggcgcaggagacgctgccaggccgtgcagagcgttaagcttcgcccagatagtgcttcagcgtcaggcgcagttccgggctcattttgtcaaggttgttatacagccagcgcaaatagcccgggtctttatccgcaatatccgacaccgctctgccccggtatttaccaaaggtaaacgtggtcagcagtgcggggcgtccggtaatcgttgccatatcgtccggcgtccagcccgaggtgttcataatatcgatgagtagcgctgcggtgatatagcagtcgtacagggcgcggtgatgatgaagcccctcaggcgtgcggacgctgagcttgcgggacttgtacagcgccatgttgctgtatttaatgcccggccagaggcgacgcgccagcttcatggtacaaatccattcccccggcatttcaggaagcacccggcggtcaaaactggcgttatgcgcgacgtaccaggggctaccgtaatagtggggaatgatctcttcgatccacggcttgtccgccaccatcgattcggtaatgcgatggatagccatcgcctgagggctgatggggcggtcaggacgcaccagatggctcattgggttgacgattttaccatcaaccacgtcgacagaggccacttccacaattccgccctgaagatcgcaagtttcggtatcgatgacgcgcagcattgaacactcctgagcttaaaacgcctagcctaaaggaatgatatcgccttgccaaccctctccgccgagcgtgccggtcaacagcagctcgcccttatccgcgcgaacgatcagctggcctttttcatcccacagcgcgctaccgccgcaggcgttcgccatcagcaccgctatggcatatttatgcgcgaagcgctgcagggtactgatggactgccgccagcggttatcctccactgactgacagctggtaaacagcgacgctctgggatcgagattgggggaatcggcatgcgcatcaataatgctgagctgtttctctcccggcaccaggctggctccgccaccttgcgggtagcgaaggatgcgttgacgagcgggggtgaagagcgcgagacctttctggcgctgaccatcccgctccacggggagcccggcaatcacggttatccggtaacgatgcgccgcgtcgagcagcggttccagctgggcgtcgccgggtgggagaggtaacgtcgtcgttccctagcctgttaatgacagttcaggaaacaccagcagatcgcacccctgccgtgctgcttcggcaatgaagcgcaggtggtgcgtgatatggtcatcgacactctgatgctgcccgctatactgggccgccgctatattccaatgtgacatcgtgacttccttatacactgagtcgcagggatttaagaatacacctaaatttatcagggttttcttatcctgccagattcagcgtaaggaagtgtaacggctcgttaagcttatttaactttaggttcgtacggtaaacgggagaggttgaccgaggcgagacggtgggcgatgagtctttcgcgaaaccagtcgcgcagatgggcgggctgttcccgttcaacgacttcagccacgacaggcatgttgtaacgctctttaaacgcgacgccagcggcagcgagatcgacattcactttatccatctcgtcctgtggaagggcggccagattgatcttcattaccttctcctttttatgcggcggcaacgttaccgcgattgcacgacgatgacaagcggaggcaggatgatcctcgactcgtttattatacagcgttattctttagcatacagacataacaaaaaggaatgattgcgatgggtttctccgcttcccgcgcggtatgcgcactggtttttctggcctctacaatgatgaccccctccgtgctggcgcatgcgcaccttaagcagccgatcccggcagcggacagcgtggtgagcgctccgcaggcacttacgctgaatttttcagaaggcatcgaaccgggatttagcggtgtggtggtgacggatgcgcaaaagcaggtcatcaaaacgggaaccgccacgcgcgacgaaaagaacaaggagcagctcaccgttccgctggatcaaacgctgacgccagggacgtaccaggtagactggcatgtcgtctcggtagacggtcataaaaccaaaggtagctaccactttagcgtgaaatagcatgctggcgctgtgttatatcgggttgcgctttatccatttcggggcgctgatgctgatttttggcaacgcgctttacagcgtctggtttacgccttcctctctccagcggctgatgtcccgacgtttccagctgcagcagaaagtggcggcttttgtgagcctggcggctgcactcctgatgtttatgcttcagggcgggcagatgggtaacggctggggcgatgtatttgccccacaggtctggtccggcgtaatgaggacacagtttggcggcgtttggctgtggcaaatgattctcgctgcgatgacggtcgctgcagcatggctcgcgccgctgaaaggttcgcggccgctgctgctcgccatggggcagcttatcctgctggcgggggtagggcacgcggcgatgaacgacggtccgatgggggcgttgcagcgccttaatcacgcttttcacctgatctgtgctgctacctggcttggcggattactgcccctgctgttctgcatgcgtctggcgaaagggcgctggcagaatgcctccatctataccatgatgcgcttctcgcgcgtgggccattatgcggtcgcgggcgtgctgctcagcggagcgatcaatgcgctcatgatactgggcgtccatattccctggcaggctgactacgtgcagtttttgttgttcaaatgtgcgctggtggcgttgatggtggtaattgcgctggcaaatcggtattttctggtgccacggtttcgtccggagaccgggcgagcacaacagatttttatcaggatgacacaggcagaagtggtgctgggggcgctggtactggcaacggtcagtctgttcgccacctgggaacccttctgacaaggttaaatatcatatgaaaaagacagtactttctctcatattgctggcctgcacggggagcgcgtttgccgcaccgcaggttatcaccgtcagccgttttgaagtgggtaaggataaatgggcgttcaaccgcgaagaggtgatgctgacctgccgtccgggccatgcgctgtatgccatcaacccgagcacgctggtgcaatacccgttaaatgaaaccgccgagcagcaggtggccagcggcaagagcagcggccagccgattagcatcattcagatcgatgacccggcgaatccgggacagaaaatgagtctggccccgtttatcgagcgcgccgacaagctctgctaacgttcaggtttccaataaaaaaccgcagatgcttgcgaaagcactgcggtttttcacattttatgatgctctggcgctttttttccgaccgctttagctgtggactggaaaacctggcgtcgtcatctattcttaaaaggcaaggcgacttagcctgcattaatgccaacttttagcgcacggctctctcccaagagccatttccctggaccgaatacaggaatcgtattcggtctctttttatctgcatgaaagtaaaagactaatccttttgttgtctcacttctgcagcgcacgtcctgtacgtctggttaaaacataacacactacggcatgctgtagtccagccctttttgcctgttttgttaaattttcgtgtgcaattcagtaaagcgcgtgcggggtctaaaagtacgacctaacagacgcttcgatttcatcaagcagctcaaagcgacggcggtattcagcgcgttttttactggcaatctcttcaagcgatttacgcgccatctgtagcggcagctgccagcagaaggctgagagctttttaccgtccagagaggcccaaaattcatcatagctggcgtggaaatggcggcctttgctgaggcgatagcgcagcgcacggaatacgtggccctcatcgctgacggcaaaaatcgcccggacggaggactgtgcagccagctggaaaagcacctccatcaacacgcgcttagggaacaaaccgtggcaggcgcgggtggcctgtttaatcacgtcacgcgttacgctgcggcgggggccctgaagcccaccgatgaccatgacctgttgcccattgctgcgcgcgacgctaaaggtcaggctggccagcagcgtatcctcgttgtcgcgaagccaaagcgtgctttcgccttcacgctcggctttccccgcagaggacgcattaaccgtatagataactccgtcttttgcatggaactgcgcaacgggcttctcctgtgggctggtcagtgccagggcgaggccgctctctttcaggctatcaatccagtaataatggctaacgatcgcgtcggcgcgatcgttagccgtcaaaccgcgcatcaggtactgccggtgggttttgctcggcaatgtaatttgagaggccagaagtctgtcgaaatcgtcgcgaccagaaagcgcctccagcatgcgatgggtagaagaccagaataccagcgaacgtaacaggaacttcaggcgatattcgcgcttgcgccaaatcggccccgggacgcgtttgccgttcaccagctcagaaataatatttgtgcgatgcggatagaaaacatcgttatgcaggtgcgtattagacacgtgaagacccctcttttttatacccttattctaaagagccaggaaaaagggattaatagcgcgaggatctttatttctgtttggtttaccgtttgtttcacttcgtgaggaccacgcccggctgttgccctttctgtggcggctatactgttaacaggaggggctatgtatcagcgaattgaaggtggaatgtggcgtcacgtctgggtggtcagcgatatacatggctgttatcagcggattatggatgagcttaaacgccgtcattttaatccgtatgaggatttgcttatttccgttggggatatgatcgatcgcggtccggacagcgttaaatcattacagcttatcaatgaaaaatggtttcgtgccgtccggggcaaccatgagcaaatggcgctcgacagtctggataataacgatttttcactctggacaatgaatggtggaatatggttcaggcaacttgaacgggaccagcaacagcttgcgctgtcgttgcttgaggcctgtcacgatttaccgcatatcatcgagataacctgtgcgaacggtctgaacgtgattgcccatgcggattatccgacagcggaataccgctggcaaaaaccggtgagcgcccagcgcgttttatgggatcgcgatcggttgatggggtttatggtgggtaaagggcagggcatcagcggtgcggatcatttctggttcggacatacgcccgtcgacagaaggtatgattttgacaatctccactacattgatacgggcgccgtatttgacggttactttacgctggcgcagctgcagtaataaataacccgccttcgggcgggttctctttaggtcaggcaagacgcatgacccaggcatcggttttactatcgtaatgttcacggtaaagaacagaatgttcgccatcaagtattgccgggacgctggtgtctgcatcccatgcatcgagctgcatgcacaaatccgggtcggatttgcagggaatacttaacgttcgatcgccttgcgcttcgccgcgcagttctgcgtcgtcgatctcaaaagcgccaatacgtacgctggttttcgtcatagtgctctccgggtcggttgtcaaaatctggtatgaccagtacggccacccatttttgatcgtagacaaggagagcaaaatcgccagtaaaaaaatgcgctttttttcaggccgtgcgatcgttaccggtaaacagtcgtccatcccggaccagctcgcgcggatagctgtttttcagtcgtgaaccgactttttttgccagcccgagcgggtatccctgatacgtcacgatcacttcatcgcctgatggcgtgctgtcaggatagacatcgcgaccacggtaccactcttcggcttcctgatgcgtcagggcaaaggcattctcgtgcccggcaagggcgatgacggcctcatgctgccagcgatagcctttattatgcacttccgccaggcggatcccgattcgggaaaaacggacctttccgatgagcggttcgatctcagccgggaacagccatacctctttatcacggatccagaggtgcaggctctcatcccagaccaggccaattttttcggcggcggcgacaagctgtgctgcatcgcgacctttgaggggggcaaacgggaagttgccgaccttgaatttgggggcgggcaggggagcaaccgcctgcgttttacgcagacgtgccacaaagaagccttcgcagtcgtaaatctgcgggaatacgtggaggaaaccctccggcgtaatcgcctcctgtgctgagacaaacagatcgttaagcggcagaaattcgaccgcatccgggtattgcgctttcagccacaggcagacgtcttcgttttcatcgcggtttaaggtgcacgttgaatagaccagcgtgccgcctgggcgaagggcatggaatgcgctctcgatcagctcccgctgcgtggcggcgatctcaaggttgctttccacggaccagttctttaacgcatcgggatctttacgcaccaccccttcgccggagcagggagcgtccagcagaatggcgtcgaaggcttctggcagggcagcgccaaacacgcggccgtcgaagtgcgtcagggcaacgttatgaataccgcagcggctgatgttggcatgcaataccttcacgcggctggcggaaaactcgttggcgaggatcgcgccccggttacccatacgggcggcaatctgcgtggtttttgagccaggcgccgcggccacatccattacgcgttcaggcgcattgccctctgcaaacagagcagccaccggcagcatcgagctggcttcctggatatagaacaggccgctcagatgttcagcggtgcttcccagcggcacggcgtcttcgtcatcgcgctcgatccagaacccctcagcgcaccacggtaccggcgtaagctgccagctgtagggcgcgaccagcgccagaaaatccgcgacgctgattttcagcgtgttgacgcgaatactgcggcgtaacggacgctggcaggcggcgataaaatcgtctaacgacaggtgagaaggaagcgcctcgcgcatctgcgccaggaattgttcaggaagaaatacggagttttgagccacgggcacaccacagggaaaagttcaggttagcagtgtaacataaaggctccggtgcgttgacaccggagccttgcagattaacgcggcagggcggttccccattcgcgccactctttcggttcgctttcgagcagcaggaaatgtttacccggctgcgctttcggcgccagcggcgtccccggcggtgtggcaaacgcaataccaccgcgaatgaactggttgaaggtcccggttttcaccacgcctcccgtcaggccgaagtccagcgagtagccggatgccagccagaacaccgagttattacgcaccaggtgctggtagcgttcgctgatgcgtagcgccaccatcacgcggtcggagagcgtcccgagcgtcaggcccgtgaccgtaccgacctcaatgccgcggaacaggaccggcgtgccgatgctcagcgagccggcttccggcacttccaccacgatgctcaggccgccaaggtagcgcgagtcggtgatcgtggcttcctgcagctcgaaatcacgacgggcattgccctggccgggctcaacgttgatgtacggctgcaaaatggtgtcgagatgctcaacgcctgcggccgagatctgcggtgtcaccaccgagaagcgcgaacccgcgcgcgcaaaggtctgcacatattccgggtagagcacggcggtagcctgcacctcgttacgcgaggtgatcagcgtcagcttctggatctgcccgatatcaatgcccaggtagcggatgggcatgccttccgccagcttgccggcatcaaacgcgtgcagggtaatctgcccgcccacggcgcgtgcggcggtctcggacgggaagagaattcgcttatcgcctttacgcaggttcgcgcccgcgccgctgaggttatcgaagctaatcgccccgcgcagcgcgcgtgacagcggagaggcctgtacggtcaatccgttaccgttcagctgcactttcgcgccgccttcagcccagaagacgctgttcggcgtcagcagcttgcggtactccggcttgatgtgcagttcgatatcaaaggcgtcggcacgcgggcgaacggtgatcacttccccgacttcaaacttgcgatacagcaccacggagcccgcctgaacgtccggcagggtctcggcgcttaacgtcagcgtggtggtaggaagatcgctcaggctgttttcaatcgctttctcaaggttggcatacagcgggtagctgtcgcgcacggggcctttatcccccggcaaaatacggatgccgccgttcacccattcgctggcgctggcgccgagaaactccacgccgtccagacctaccttcacgtcgacgcgactgttcaccacgaatttactgtcgccatgtaccaggtctctgtattgcggatcgatggcgacggagaattgcaccccatccgcggagagcttacgctccagcacctgtcccacctgcacgccgtgtaaaatcaacggctgaccggcttcaatcccatagctttctggcgcattgagcgtaaccgtcacgacgcccggcttttgcagcagggctttatccgccggggcaatcacgaagctattgctgggctgaccttccccggggatcagctcaaaggtattgccggtcagcagcgtgctgaggctggcatcgttaagagagagctttggactgcgcatttcgatgcgtgttttctcgcgcaggagatcgaccacgctcggatcgaccgtcatttcgccggtgaccgaaccgcccgggttgagcgtcattttggtgagctggccgacctgcagaccctgatacatcagcggcgttgaacccgcttttagtcctttagcatcgggaagggcgagtttgacgatcacgccgcgctggctgtgcgccagatcggcgtacaatccgaacgtgtcatcagccgtggcagggcttgagttttccggggagtcaaaggcgatggcgccgttcaccagtgcggccagactctccagcttcacttttgcaccgctcaggctgaggtcggcatccacgccggacacgttccagaagcggctgccctttttcaccagattggtgaagcggcgctcgattagcacatcaatggtgacgccctgtttattcgggttaatcgcgtaatcgtacacgcggccaaccgggatcttacggaaatagaccagggagccgctgttcagggaaccgagatccggcgcctggagatgaatcatcaaatcgccgttattgaggcggtatttgggctgcgtatccagagcaacaaagtgatcctgcggctcacctttgccgggcatcatgccgatatagttaccgccgacgagcgcatccagaccggaaacaccggccagcgaggcttttggcgtcaccagccagaactgcgtttcgctgcgcagggcatcctgcatgtcagatttaatgctgacccgcacctgaatcttgttcagcccttttccaagggagatatcctgaaccgtacccacttcaaccccctggaagcgtacgggggttcgcccggcgacgatgccgtcggcggtctggaaatcaatggtgacggtactgccgcgatcctcatagcttgtccagataagccagcctgcaatcatcagggcgatgacgggcagcaaccagaatggcgaaatgcggcgttttgttttaattctcgcttcagtcggcgaagcgggggtttcctgactcatgtgcatcccaaagtaagcggctatccagccattccacagcaagaatagtcaatatcaccgcagagccgaaataaaaagccgcgggtcccattgtaaaagcaagtaactgatcgcgattgatgagcgacatcatcagcgaaatcacgaacagatctaacattgaccagcggccaatccaggtgacgaatcgcagaagcaaaatgcgggtccgtaaaccttgttcacactttaagtgaatgctgatgagcagggtaatcatcaccaccactttggtaaagggaaccaggatactggcaataaagacgattgccgccaccccgacattgctgtgcgcaagggagataatcccggagaggatagtatcctcttgacgtccaccattcacgtaaatgatggaaatcggcagcatattggcggggatcagaaacaccagggaggcgatcagcgccgcccagcatttttgcaggctgttattgcgccgcagtctcaacggaatgtggcatcgcgggcagcgtccgcgcgtgtcgggtaacccggtatagtggcaacccagacagacgcgcagattttcatcgggacgcgtggcggggcgctgagggtagaatcgctcccagagctgctcaacgttcaggtggatcagcgtcaggatgctcagcaataccagacagatgaaggcaaagagtccgacgccgggctgcaaaaaggcgtagtcctgcacctttattgacgcaacccccacgccgaccagataaatatctagcatcacccactctttgagcttgtccagcatcagcagaaccgggcgaaggttcatgccaagaatattgccaaaccagagataggcaatggcggcaaccagcaccaggggggcgccgacggtgcagaacagcaccatcgcggcggtgatgggatcgccctgacgggtcatctgccagatgccctgcagcacgttggcgtcaatgcgcacgccgagcaggtagagttttagcagcggctcactccaggcgaagggcatcagcagcagcatggtaacggccatggcggcgaggcgggtcaacgaccagtcgcggccatcgcgaattttggcgtcacagcggggacagaaggcactttggtgcgatttcatcttcggcaacataaaaagcgtatcgcactgggggcaacgctgataatgtgcacgaggcaaagcttcgcttaccgtatggacagttatctttcttgtcggcgtaattttggttgtttttaaggccatcagctgcgcacaaataagtattgttgaaagttataataactcatgaacggattcatcttgagcatgagcgcatttaatgcttattttaataggctatgcggtaattttgtaagacaactaagtgattgaataatgaacaaaacagaattctacgcggatctgaaccgcgattttaaggcattgatggcgggtgagaccagcttcttagccactctggcaaatactagcgcattgctgtttgaacgtctctctgacgtgaactgggctggcttttaccttctggaaggtgaaacgctggtgctcggtccgttccagggcaaactggcctgcgtgcgtattccggtagggcgtggcgtatgcggcacggcggtggccgagaatcaggtccagcgtgtggaagacgttcacgcgtttgacgggcacatcgcctgtgatgctgccagtaattctgaaatcgttctgccgctggtggtcaaaaatcagattattggcgttctggacatcgacagtacggtcttcagtcgctttacaaccgaggacgaacaggggctgcgcgagctggtggcgaatctggaaaacgtactcgcagcaaccgattatcaaaaattctttgcgagcgtcgcaggataatcaacggataacgtagcatttactgatagcgtcattataatgacgcctgttcatgcctgcgcttgttggcaacgtccgttgtaatcaggaaatttcatggaaaatcaacctaagttgaatagcagtaaagaagttatcgcatttctggccgagcgtttcccgcagtgcttcagcgcggaaggcgaagctcgtcccctgaaagtcggtatttttcaggatctggtggcgcgtgttgaaggggaaatgaacctcagcaaaactcagctgcgttccgccttacgtctttatacttcgagctggcgttacctgtacggtatcaaacctggcgcgacccgcgtggatctcgacggcaacccttgcggtgagctggacgagcagcacgttgagcacgcgcgcaagcagctggaagaagccaaagcacgcgttcaggcgcaacgtgcagaacagcaagcgaaaaaacgcgaagccgccgcggcaaacggccaggaagaagcgcctcgtcgtgagcgtaaaccacgccctgcgccgcgtcgtcacgataataacgatcgcaaaccgcgtgcagacaaaccagcagcaaaagccccgcgtgcccctcgtgaagagccgcgccatacgccggtttctgacatcaacgccctgagcgtgggtcaggcactgaaggtaaaagcgggtaacaatgctatggacgccaccgtactggaaatcaccaaagatggcgttcgtgtacagctgacttctggtatgtcaatgattgtacgcgcagaacacttgttgttctgaaacggaggccaagcctggcatgaacactttttttaagctcaccgcgctggcgggcctgtttgctataacaggtcacgcctttgcagtggacgatatcacgcgtgttgatcaaattccggtactcaaggaagagacgcagcacgcgacggtgagcgagcgcgtgacctcacgtttcacccgttcgcactatcgtcagttcgatctcgatcaggccttttcggccaaaatctttgaccgctatctgaacttgctggattacagccataacgttttgctcgccagcgatgtcgagcagttcgctaagcggaaatccgaggtgggtgacgagttgcgttcaggcaagctggatctcttctacgatctctacaacctgtcgcaaaagcgccgcttcgaacgctatcagtacgcgctgaaagtgctggaacgtccgatggacttcaccggcaacgacaccttcaatctggaccgcagcaaagcgccctggccaaaagatgaagccgagctgaatgcgctgtgggacggcaaagtgaaatacgacgagctgagccttaagctcaccggcaaagacgaaaaagagatccgtgacacgctgacgcgtcgttacaaatttgccattcgtcgcctggcacagaccaacagtgaggatgttttctcactggccatgacggcctttgcgcacgaaatcgatccgcacacaaactatctctcacctcgcaacaccgagcagtttaataccgaaatgagcctgtctctggaaggtatcggcgcggtgctgcagatggacgatgattatacggtgatcaattcgatggtcgcgggtggaccggcatccaaaagcaaagccattagcgtaggcgatcgcattgtgggtgtggggcaaaccggccagaacatggtcgatgtgatcggctggcgtcttgatgacgtggttgcgctgatcaaaggtccgaagggcagcaaggttcgtctggaaattctgccagccggaaaaggcaccaaaacccgtatcgttaccctgacccgtgagcgtatccgtctggaagaccgcgcggtgaaaatgtcggtgaaaaccgtgggtaaagagaaggtgggtgtcctggatattcctggcttctacgtcgggttgactgacgatgtgaaagttcagctgcagaaacttgaaaagcagaacgtcagcagcatcatcatcgacctgcgcagtaacggcggcggggcgctgacggaagcggtttcactctctggcctgttcatcccatctggcccggtggttcaggtgcgcgataacaacggtaaagtgcgagaagatgcggacaatgacggtgtggtctactacaaaggcccgctggtggttctggttgaccgcttcagtgcatctgcatctgagatcttcgccgctgccatgcaggactacggccgcgcgctgatcgtcggtgagccaaccttcggtaaaggcaccgttcagcagtaccgctctctgaatcggatttacgatcaaatgctgcgtccggaatggcctgcactgggctcggttcagtacaccattcagaaattctaccgcgtaaacggcggcagtacgcagcgtaagggggtcacgccggacatcatcatgccgacaggcacccaggagacggaaactggcgagaagtttgaagataacgcgttgccgtgggacagcatcaatgccgcgacctacgtgaaagcgggtgatatgacgcaatttggccctgagctgctgaaggcgcataacgaccgcatcgcgaaagatccggagttccagtacatcctgaaggatattgcccgattcaatgccctgaaagataagcggaatatcgtttctctgaactacgctcagcgtgaaaaagagaacaacgaagacgatgcaacccgcctggcgcgtatcaacgatcgcttcaagcgtgaaggtaaacctctgctcaagaaactggacgatctgccaaaagattaccaggagccggatccgtatctcgacgagacggtgcatatcgcgctcgacctggcgaatcaggaaaaagagaaacctgccgtacagcccgctccggcaaaataacctcccaacaggcacaagagattgtgcctgtttctttttgttcttcatccttccgtcagccagattttcaattgtgtaaagttgtgtctttctggtgacttacgcccgccggatgcttgaaaatagccgcaatacccatacgatgtgggtaatcgcatagtgcgttttgttaaactgaggtaaaaagaaaattatgatgcgaatcgcgctcttcctgctcaccaacctggcggtgatggtggttttcgggctcgtgctaagcctgacgggaattcagtcgagcagcgttcagggtctgttgattatggcgctgctgtttggttttggtggctcgttcatctccctgctgatgtcgaagtggatggcattgaaatcggtagggggtgaggttattgaacagccgcgtaacgatatggaacagtggctgatgaatacggtggctcagcaatcccgtcaggccgggatcgtcatgccgcaggtggccatttaccatgctccggacatcaacgcgttcgccacgggtgcccgccgcgatgcgtcactggtcgctgttagcaccggactgctgcagaacatgagccgtgacgaagccgaagcggttatcgcccacgaaatcagccatatcgcaaacggtgacatggtgaccatgaccctgattcagggcgtggtaaacaccttcgtgatctttatctcccgtattctggcgcagattgccgctggcttcatgggcggcaaccgtgacgaaggcgaagagagcaacggcaacccgctgatctattttgccgtgtcgatggtgctggaactggtattcggtattctggcgagcatcatcacgatgtggttctcccgccaccgtgaattccacgcggatgccggttctgcgaagctggttggtcgcgagaagatgattgccgcgctgcagcgtctgaaaacctcctacgagccgcaggaagcgaacagcatgatggccttctgcattaacggtaaatccaaatcgctgagcgagctgtttatgtctcacccgccgctggataaacgtattgaagcgctgcgcagtggggaatacctgaagtaacgcaacaaaacacaataagccgggcaggagaacactccgcccggctttttttatgcctgaaccctgggctgggtcacccgcaggccgctgacgatggccgcgagggtggcaagcacaccggcggtgaggagggcaacatggttgccattctggcctgcgaggttaaacatcagggcgaccagcgccgcaccggtgctttgcccaaggagacgcgcggttcccaacatgccgctggcccctccgctgcgatgtcgcggcgctgaggtgataatggtgtggttattgggggactggaacagcccaaaccccgcgccgcagaggatcatgcgccagataatgtccagatcggaaggcgacgagggcagcaatgccagtgcaaaaaggcctgtcgccatcaccgccagccccagcgccccgagtaaaccggcgtgaacgcgttcaattaagtaacctgccagcggggccatcaccatggtcgccagcggccagggggtgagcagcacagtccggtctccacttctgaccggcctaccacgctctgcagaaagaagggcagagaaaccagagccagcatctgggcgcaaaacgagcagacggacgtgcaaatggagagtgaaaagagaggaatacgcagcagatcaacgggcagcaaaggcgcggggagggtgagctggcggcgaacaaagaagaagccgatcgccagcagggcgatgagctccgcgccggtaagcatcagcgattgtccctgcgcaaagccgctcagcgccgtaatcagcaggccgaaggtcagggcattcatcaccgcgctcgccacgtcgaagcgcggcatgctgcttttggggccgttagcgggaagaaagcgcagggcaaagaagatagcgacgatacccagcggcacgttaatggcgaacagccattgccatgacgcgacggaaaggatcgctgccgcaatggttggcccggcggcagaagagacggccacaataaacgagtttatccccatcccgcgccccagatggcgctggggataaatcaagcggatcagcgccgtgtttacgctcatgagcgccgcgccgccaaaaccctgcgcaatacgcgctagcgtcagggtatgcagtgaatctgaaagggcgcagaacagggaggtaaacgtgaaaaccaccaggccacactgatacacccggcggtaaccaaacatatcgcccaggaaagagaatgagagcagtgaaaccacaatggcaatctgataggcattcacaatccaaatcgaactggcgggggaagcatgcagatcgctggcgatggttggcagggcaacgtttgcaatcgcgccgtcaaggacggccatggagataccgataatgatggttgctatcgcgccataccgctggggtaagggcaggccatcggaaagattcttttccatcaggtgtaaaaagctcagcgtgaaattattctcagggtaactattttagcattgttacagccgcgatatgtcgcagatttgtaacgaagtaaacgcggattgattgcagctgacatgacgggaacttataataaaaaccagttctgatttttataaaacactcgctatgaggtggtaaatggctattgcggatttggataaacaaccagattctgtttcttccgtgctgaaggtgtttggcatcttacaggcgcttggagaagagcgtgaaataggtattacagagctgtcacagcgcgtgatgatgtcaaaaagcaccgtttatcgctttttgcaaaccatgaagtcactgggttacgttgcgcaggaaggcgaatctgaaaaatattctctgacgctgaagctgtttgaactgggggcgcgtgcgctacaaaatgttgacctgatccgcagcgcggacattcagatgcgtgaaatctctcgcctgaccaaagagaccattcatctcggtgcgctggatgaagacagcatcgtttacatccataaaatcgactccatgtacaatctgcgcatgtattcgcgcattggtcgccgcaacccgctctacagtaccgcgattggtaaggttctgctggcgtggcgcgatcgcgaggaagtggagcagatcctcgacggcgtggaatacaagcgcagcacggaacgaaccattaccagtacggaagcgctgctgacggtgctcgaccgcgtgcgcgagcaagggtatggcgaagataacgaagagcaggaagaggggctgcgctgtatcggcgtcccggtatttgaccgctttggggtggtgattgcgggcttaagtatctctttcccaaccttacgcttctccgaagagcgtcttcatgagtatgtgtctattctgcatactgccgcacgtaaaatttctgaacagatgggctatcacgactacccgttttaatccctgctgaaatgaaaaaacgccgcatctgatgcggcgttttttatgcctcatgaacctggctgattagccgttatcaatcacgacggaggttttacgcagtacaggacattgggttaagccaatgatcccgctgtcagtatgcagatactgggcggtgctcattccttgtgcggttaggtatttacactgaatgcctaacccggctgcgttttctgtgctccccacaagcacaccatagcccgttaacagaaggccaatccagacaagggtcagtgcaataattgttcgaatgatgaatcgcattattacctcttttatcgttgttatcgtaatgctagcgtaacctgtttacgcaatgaaacaagtgcagcattcttaaaaaccgcgatggaggcgcagttagcccttgtttaagataagcgtgataatctcgttacatcaggtccttagacggagtgtggagtgaaaaaaatacgctgggtaattctgattatcgtactgatagcgtgcgtggtgttatggacgcagacgatcaatgtgatgtgcgatcaggatgtacagttttttagcggcgtttgcgcaatcaacaaatttattccgtggtaatacacattttttctcaacgtgatttccttccttcacgccagtggtaaaatagacgtttttattgaggtggtgaaatgggtgagttactgaattcagggttgctgaatatggcatccctgatgatttctttggtggttctgcttgtggggctggtcatctggtttttcgtgaatcgggccagttcgcgtacaaatgagcagatcgaactgctggaagcgctgctcgatcagcaaaaacgccagaatgcattgctacgccgtctttgcgaggctaacgaaccggaagagaaagacgcgccgaaagacgcggtcgctgaagataacaaagacgaagacgactttatccgcctggtggctgagcgttaatctttttagtcctgggaggtggctgtggtctggaaaaatccctggtatgacccctccctgaaacatcataccccgaacggttttcgtaatacccttcctgtcggacatcaacccggtgaccttgaccgttggcgtaaagcgcgcaaagaggccggtttaccgaagccgcccgcgctgggttatgacgatttcatccgccagtggtggcaaccggttgagcttgcggcatctcatgaagatggggtgtggtggctcggacacgcgagcgtgttgctgcagctggacggcaatatcatccttaccgatccggtgttttcacgacgtgcttctccgctgcctttcctgggaccccagcgcaaaacgcctcccgtactgtctgtcgagcaacttcatcagcttgatgcggttgtcatctcccataatcattacgatcatcttgatgacgcaaccattcgcaggatcctcaagcgctttcccgacgtctgttgtttcgttccgttgggcctggccgactggtttcgtcgccggggagcaaaacgcgtggtcgaactcgactggtggcagagtttcacctggcaggggatgacgctgaccgccgtgccggcgcagcactggagcatgcgcacgccatggaaccgcaatcgttccttatggtgcggctgggtgatagaaggacggcatcatcgtttctggttcagcggtgataccggctattcgcctgagctgttgttgattcctgaacgcctgggccagatagatgccgccgcgttgccgattggtgcctatgccccacgatggttcatggctgttcatcatatggatccgcaatcagcggtggcattgtggcagcagctgggctcacctctggcgttccctattcactggggcgtgtttgaactggcagatgaagctttagatgaacctgtgcaggagttaactgacgcgctcgataatttagcaccagttaatcattctttcagaatactgaaaattggtgaatatttatccttctaaacgaagcgataaattgttgcatatattcttgatgtaaacgcgcctgggaatgttttatttttatcgaaacgttttgcttgccttcttttgatgcagagtcataaaaatttcattattttggtgcataacgctgtttattcgctggtgcattttaatacagatggaagcaggtttttaacagtgttttttctctgaaacaatttggtcgcgttacaatgatttaagcataacttttcacaaattgttctaactcaatcaggagtaaagatttcttttcctggttgctggacggttcgtaatgaatgagctatgttaaaaaagtcttagattacagcggttgtgcaagcaatgctgggtctttgttacgcagcagggctgtctgtacgcgatgcgcataattgtgcaaaacctgacaggcactgttcgaatttgtgcggcggatcgagacatgtttaaaaatggcttgccatattaaacatagtgtgtgataacacgttttgggtcaaacgaggtacagttctgtttatgtgtggcattttcagtaaagaagtcctgagtaaacacgttgtcgttgaataccgcttctctgccgaaccttatattagtgcctcatgcagtaatgtctcagttttatctcagttaatgcctgcgggctaagaaaacactctaaggaattttgcaaatggcaaagattaaaggtcaagttaagtggttcaacgagtctaaaggttttggtttcattactcctgctgacggcagcaaagacgtgttcgtacacttctctgcaatccagggtaacggcttcaaaactctggctgaaggccagaacgttgagttcgaaattcaggacggccagaaaggcccagctgcagttaacgtaactgctatctgatcgaaccgctgctgactgaagtgcccggcacttcactctcagacataaagcctcgcctgtcgcggggcttttttatgtcccttatctttcaaaatattaccatccacggtcttgttagtaacttgttgcaaagctgcgaggttagtagcactgttttgccaccctaaacccatcttttcccgttaaatcagtgcgttgttttacagtcctggggttcaggtgaagaagaaatcgatagcgaccgtcggaaatttcacgccggcgcgttttgtgctgctctgtttagctattttttgtagtctggcttttctgctgggtcgcgttgcctggctgcaaatcattaagcctgacaatctggtgaagcaggaagatatgcgatccctccgccagctggcgattgatgcgccgcgcggcatgataatggatcgcgagggccgccctctggcggtgagcgtgcctgtccaggccgtctgggccgatcctaagacggtgctggcaaaagggggcgtcagccttgatgagcgctggcaggcgctggccagcgcgctgcatctctccctcggcacgctctcggcacgcatcaacgccaacccgcagggtcgttttatttaccttgcccgccaggtcgatccggcacaggcaaagtggatcgataaactgaatctgcccggcatcaatttacgcgacgagtcccgccgtttttatcctgctggccatgttgcagcgaacctgattggtttcaccaatattgacgggcagggcattgaaggtgtggaaaagagcttcaacgcccaactcaccggcaagccgggcgtgcgtcaggtgagggaagatcgctacgggcgcgtggttgaaaacctgactgaaatcgcgccctcaccggcgcataacattcagttaagtattgacgagcggctgcaaaccatcaccgaagatgcgctcgacaatgccgtggcatggaacaaggccgagtcgggggcatcggtattaattaatatcccaaccggggaaatactcgcgatggcgagctatccggatttcaatcccaataatcgggaaggcgcgacgataaatgatttccgcaaccgcgcgatcagcgatacgttcgaacccggttcgaccgtcaagccgctggtgctgatgacggccctgcagcagggcctggtccagccggatagcgtgattgacacccatccgtatacccttgacgggcatcgcattcgcgacgtgggctattaccctgagctgacgatgaccgggatcctgcaaaaatcgagcgacaccggcgtttcccggctttctctggcgatgcccgttcagcaccttattgatacctatcggaactttggttttggcaccaatacggggcttggcttaacgggggaaagttcagggctgttgccacagcgtaaatactggagccagctcgatcgcgcgacctttgccttcggctacgggctgatggtcacgccgctccagctggcccacgtctacgccacgattggcgggttcgggcttgagcgtcctctctccatcacccgcatcgatccccccgttatcgggcaccgcgtcatgccggaagagattgcgcacgaagtggagcacatgatggagagcgttgcgctgccgggcggcgggggcgttaaggctgccgtgcgtgattaccgggtggcggtgaaaaccggcacggcgaagaaaattgacgatagcgggaagtatgtcgataaatacgtcgcctacaccgcgggcgttgcgcctgccagcaatccgcgttttgctctggtggtggtgattaacgatccgcaaaacggggcctactacggcggtgccgtctccgcgcctgtcttcagcgagattatgggtaacgtgctgcgtctggagaatatcaaacctgacggattaccggcggggtccgaacaccttatcgtcatgcgctaaccgggcgtttataacaggggcgaatagcggtacacttcgccctttgattatgctccggagtagccatgtccttcagctgtcccctttgtcacgcccccctgacctactcagataaacgttatacctgtccgcaggggcatcagtttgaccaggcaaaagaaggctacgtgaatcttctgccggtacagcataagcgctcgcgcgatcctggcgacagtgcagagatgatgcgggcgcgccgcgcgtttctcgatgccgggcactatctgccgctgcgggagaccgtcgcgcagaggctgaatgacattctgcctgcttccgccaccgccatgctcgatatcggctgtggggaagggtactacaccgcacggtttgcggaggttgctcgtgagaagggcgcacagacattcggtctggacgtgtcgaaagtggccattcgcgcggcggcaagacgttataccgacgtgacgttctgcgtggcgtccagccaccggctgccgtttgacgatgccagcatggacgcggttatccgcatctacgcgccgtgtaaggcggaggagctggcgcgcgtcgtgaaaccgggcggatgggtggtcaccgtgacgccaggtccgcgtcatctgatggagctgaaagggctgatctacgacgaagtgcgtctccatgcccctcattctgaacagctggccggttttaccctgaagcaggcggaatcggtggcgtacgaaatgatgctgaaaggggaagaggccgtcgcgttattgcagatgacgccgttcgcgtggcgggcaaaacctgaggtatgggaaacgttagccgcacactcaacatttcgctgccagacggactttagcatccacgtctggcagcgcgaagattaaccggcgaagtgtgcccagaggatctgggcaccaatgccaatcagcacaatccccccgaggatctcggcgcgtttacccagcagcgggccgataaaccgtccgaccatcatgcccagcgtggacataatcagggttgcacagccaatagccagcgcggtggcgataatattgacctgcaaaaatgccagaccgacgccgacggccatcgcatcaaggctggtggcaatggccgtggtgaccagcagccagaagccgtggcggtgctgcggctcctcgtcttcatcatcgccgccgcgaaaaccttcaatgaccattcggccaccgagaaacaccagcaggacgaaggcaatccagtggttccactccagcacgaactggctggcgagcatgccaagtccccagccgagaagcggggtcagcgtttcgatagcgccaaaaatcaggccggtacgcagggcttctgagaatttaggtttgtggagcgtggcgccttttccgatggaagcagaaaacgcgtccatggacatgccaaaagcgagaaggatcgtagcggagatattcataacagcgtccagaccggggatatccatatgacacatcactgcccccagtaaacagcagttgatgtatctatggtctcgcctgatcgcaacgcacataagacatgcggtaagcgatccgtacgtgccacgtttttcaacgagtatgttgacacgtacatttcctgcgaacaggaaatcggctactccccaacgacgggcgcaaccttaacatattttgagaatataaaacaacaatgaaaaggcattatttaaatcgtttgttgataacgattttcatttgtctttaatcgtgaaaatatcgttaacaaatagcgttcaaattagcggtggggatatagctttggctatattgcttgcgcaaaataaacacaggatatagccattgctatatagctaaatcattgagttttaacaagtaacttgtatatcttttccaggtcatcaatattcttcacccgaataagcaggcggcgttgttctaattgcatcaccagcacgccgtcctcggataaattcatttctttaatacggttatattctatccagacattggcgaagaagaatccgtgggatttaaaaatgattttcggcgtgcggatccagaacagataaatcgccattaatgccagcgcacataataaccatgtggttaataatgcaccatggctggtgacgttattgtaaataagaatggcgatgaggcccacgaagataaaggcatccacgcgcccgcgtcgtagcaggggaagggagagcagcgtctcgccgtgacggcgcggcatgatgaactcgtcatagatcgcataagccagaagggcaataataaataaaaccagtacgatgtccgtggcagtcattcatcctccagataaaaaaaaccgggggcaagcccccggcctatagcattgatacttacagacccagcaggccgacggcgtaacccgcgataccgatgacgaagaagccaacgataatccacagcgggttcactttcttacgcagcagccacatacaggcgaaggtcaacagcagcgggaccaggcccggcatcagctggtccagaatcgtctgcacggtggtgacgcgggtctgaccatcctgtccggtgatggtcgataccaccagcgggatgttcacgtgcgtccacttgttaaccagtgcccccatgacaaacaggccgaggattgacgccccctcagtcagtttctgcaggaagccgccgcccatgtccttaacgatgtccacccctttacggtagccgtaggccacaccgtagtaacgggtcagcagacgcacggcgttgaacaggatgaagaacagcagagggccaagcaggctgccgctcatcgcgataccggcacccagcgccgcgaacaccggacgcacggtaccccagaagatcgggtcaccgacgccggccaacgggcccatcaggccgactttgataccgttgatggcaccatcgtcaatctctgcaccgttcgcacgctgctcttccatcgccagcgttacgcccagtacgggggccgcaacgtaaggatgggtattgaagaattccaggtgacgcttgatggcctgacggcgcgcttcgttgttttccgggtacagacgtttgattgccggtaccatggagaagcagaaacccagcgcctgcatacgttcgaagttccatgaaccctgaaacaggttagaacggatgaacacgccacgaatatcacccggagtgagttttttctcggtggtagtttttgtcatatcaaccatgtcgctcacctgttagtccagttcgttatcgagatcgttgttaccagcagcctgcgctggggcacccgcgacgcggttatatttcgggctgagctggatgtagagaatcgccattaccgcaccaatcacacccagtgcaaccaggttgaagttggtgaatgccgcggtcacgaagccgaggtagaagaacggcatcaggtagcctgcgcgcatcatgttgatgaccatcgcataaccaacgaccacgatcatgccgcccgcgatgttcagaccgccggtgaccacttcaggaatggcgttcagcatgctctggacttcactggtacccacagagatcgcaacgataaccgccgggatcgcgatacgcatcgcctgcaggaacagggaagaaacgtggatccacgacagtgccgtgaggttgccgttttcggcggccttatccgctgcgtgctggaaggctacggtgatagtacgaacaatgatggtcagaacctggcctgcggctgccagtgggatcgccagggcgatacctgcaccaatactctggtgaccggcaataaccagaacggtcgaaatgatagaggccagcgcggcatcaggcgcaactgccgcaccgatgttcatccagcccagggcgatcatttccagggtaccaccgatgatgataccggttttcatgtcacccagaacggccccaatcagcgtacaggccaccagagggcggtggaactgaaattcatcaagtacggattccatacccgcaatacatgcgacgacgaacaccagtacaatctgaagagtggtaatctccattgcacttctcctattacataaactttatgtgagaaccggcgcgggcttatttcccaactttgccgatcaaatccatcattttcagtttttgatccgtggaaaccttacgggcttccagctcaataccgcgcgcattcagcttgttgaatgcctcgatatctttcgcatcaactgaaatggcgttgttgacctgcgttttgccctgacggaaggccataccaccaatgttaacggaggtgattttcacgccgccttcaacaatgcgctcaacgtctgtcgggttagtgaacaggagcattacgcgttcgcccgcatatttcgggttgttgtaaacgcggatcatcttggcgacatccacgacgtgcgcggtaacgccaggcggagcaacctgagtcagaagggttttacgaacggtgtcggcggccacttcgtcgctgaccacgataatgcgttgaacgttggtctctttggtccagcgcgtggcaacctgaccgtggatgaggcggtcatcaatacgcgcaaggccaatcaccatgtaatcattcggacccatcggttttgcaggcgctgccgctttcggtgccgctgcgggcgcaggggcaggtttttccaccggctgtgctttcagggctttcaccccttcacggcccgtttcaacggccagggccaccagctcgtcgaaagacggattgtcgtcgcgcgccatgaaggtttccaccagcatggggatattgaccccggcgacaacttcatagtgctctttatcgacgacaatgcggctggcagcattgaacgggctgccgccccatgtatcaacgagaaacagcacgcccttgctggtatccagcttcgcgagttgagcgttgtacttctcaatcagcgtctcggcgttttcaccgggaacgaaatcgatccagccgacgttttcctgctcgcccaacagcatctctgccgttttgagtagctgctcagcagcccaaccatgtgtgcctatgacaatagcaatggtcacttgctacctccttttattatcattaatacgcctgccgggcagtcgtactgagaatcgtattggcgaaccgaatcgattcagataagggttagagttcaaaaaactaagacttccgcgaattattttagatagtgaaaaaataatttatgtgatgaagatccgtaatttagccacgcgcgacagatttatcttaagggtacagccactgtgttacagatctttgcaaaggaacgtaaatctttgctaaaaatgcattgtgtctgatatgtttagcctccgtttaattgttcaggagtatagggctacagcccactatatggaccgtcaccgacgtcagtcatctttcaggccatttcgcgcctttttcaccggcgatcctcgccacgtatcgactctgtctgcctctgttttgcccacgttgagtggggcaccgtttcgtcattcctttagcaggagcttgtcatggaattcttaatggacccgtcaatctgggtaggattgctcacgctggtggtgctggagattgttctcggcatcgataacctggtgtttatcgccatccttgcggataagctgccgccaaaacagcgtgataaagcgcgtctgattggtctctcgctggcgctggtcatgcgactgggtctgctctccgttatctcgtggatggtcacgctgaccaaaccgttgttctccgtcatggattacaccttctccggccgtgatttgatcatgctgatcggggggatattcctgctcttcaaagcgacgacagagctccatgagcggctggaaaaccggcagcacgatgatggtcacggtaaaggctatgccagtttctgggtggtggtgctgcagatcgtggtgctggatgcggtcttctcgctggatgcggtgatcacggcggtcggcatggtgaaccatctgccggtcatgatggcagcggtggttattgcgatggcggtcatgctgctggcgtcgaaaccgctgacgcgtttcgtgaaccagcatccgacggtggtggtgctatgtctgagcttcctgctgatgattggtctgagcctggtggcggaaggctttggcttccatattccgaaaggctacctgtacgctgcgattggcttctcgatcctgatcgagctgttcaaccagattgcgcgtcgtaactttattaagcagcagtcaaatcagccgctgcgcgcccgtaccgcggatgccattctgcgtttgatgggcggtcgtcgtcaggtgaacgttcagtctgattccgaaaaccacaacccggttccggtgccggaaggggcgtttgtggaacaggaacgctacatgattaacggcgtgctctctctggcctcccgttcgctgcgcggcatcatgacgccgcgcggggagatcagctgggtcgatgctaacctgagcgtggatgaaattcgccagcagctgctctcttcaccgcacagcctgttcccggtgtgtcgcggcgagctggatgagatcatcggcgtggtcagggcaaaagagatgctggtcgctctggaagaaggcgttaacgtcgaagccgttgctgccgcatcgcctgcgattgtggtgccggaaacgctggatccgatcaacctgctcggtgtgctgcgccgcgcgcgcggtagctttgttatcgtcaccaacgagtttggcgtggtgcaggggctggtgacgccgctggacgtgctggaagcgatcgccggtgaattcccggatgaagacgaaacgccggaaattgttgccgacggtgaaggctggctggttaaaggtacgaccgacctgcacgcgctctcgcacacgctggggctggaaaacgtggttaacgatgaagaagacatcgcgaccgttgccggtctggttatcgccgtgaacgggcagatcccgcgcgtcggcgatgtgattgagctgccgccgctgcacattaccattgtcgaagccaacgactatcgtgttgatatggtccgcattgttaaagaacaatctgcccacgatgaagatgagtaagtctgcttaacgcagcggcattaagggcacgatgtgcccgttatgacgcgctggcgggggagcacttcccgccagccagtctggaaagtcccgcagcggcatcggccgcgcatagaaaaatccctgcagcacaggtacgccgtgacggcgtaaatagcgcgcctgctcctcagtctcaaccccttccgccaccagctcgatatttagccgctggcccagcgcaataatcatatccgtcaccgttgaattcacggcatcggtgccgatggcggtcgtaaaagactggtcaatcttcaggacgtccgggtgcagcttttcaagccaggagagggagctgttcccggtgccgaaatcgtcgatagcaagcttcacgcctttgcgatgcagttcacgcacgatgcgataatccgcgtccagcagcgcatcccgttccgtgagttcaattaccagctgttggcgcggacaggcgctgaaccagagacggttcagatcctgtatcaatactgcgtggcggaaatggctggcggcgacgttaatgccgatgtgaaaaccggggctggacgggaagtagcctatctggcgcaccgtttcggcgatgacgtagcgggtcagggggacaatctggttatgttcttctgccagaggaataaacacctccggggtgatccaaccctgacgggggttattccagcgcagcaggatctccacgccagtgcacgcctgggtgcgggcattcaccagcggctggcagaaaagctcaaattcccgcgccgcaatgcccatatcgatctcccacgtaaagctcatccggtttgccgtcgccagccaggcgagatagcccagcagcaggctgagcataagccccagcggcagctgggcgggcaggctttttaaggctaactctccggggccaggtccgccgaccgtaatcgtgaaaggattttgggttgaagactgctggaaaagggcgctctcctcatcaaacgtcaggctgtcggtgacgcgttgaccgtagcgtaaaaagcgattgccgactgtcagcaccacgtcattgatgagcggacgctggggctcaaggatcattctggcgatcaggtcgatattgataatctcgacgacgccatcttcaccgtcctgagagacgggataccactggatcaaaacagggctacccttaagcagccactggtcggtcgataaaatcagcttcgccgtgctggcagggagctcctgaaggacgtcacgcacaggcttgctgcggctgccgaaaatactcgaacagtacaggataccgtctttgatcagggcaatggagcgtaccgtctgcaaaatggctgcctgctgccgcagcgccagttgcacctgcaggcagggctgccccaccagcggctgcagcacgttgcggtggttttccagggaaagcagaacgttatcaagggcgcgaacggtatggctggtaaaatcgaggatccgctgttggttaacgttgcgctgggagataaagcgaatgcctagcgtcaggatgagcgtgaggagcgcaaccgtcacgcagacgataacgcgttttcggcgataatttttaatgatcgtttgtgcagtttgcatgaacggtcgcctgataagccaccagccacaaaacccggacgcaacagtaaaagtgtagtggggaaagcagaaggagacgaggaagaagagggaaattcgcccatccgttgcagatgggcgaaaggcagtattagtcgcactgcaccttaatggccaggccaccacgcgacgtctcgcggtatttcgcgttcatgtctttgcccgtttcgtacatggtttcaatcaccttatccagcgatacgcgaggttcgctggtacggcgcatcgccatacgagaggcgttgatggctttcaccgaggcaatcgcgttacgctcaatgcacggcacctgcacctggcccgcgaccgggtcgcaggtcagaccgaggttatgttccataccgatttcagccgccacgcagacctgctcagggcttgcacccaacagctctgccagacccgccgccgccatggagcaggccacgccgacttcaccctgacagcccacttccgcaccggagatggaggcattcatcttgtacagcgcgccgatggcacctgccgccaggaaataacggatatagatgtccggcgtcacgggctcaataaagtggtcgtaatacgccagcaccgcaggaacaatgccgcacgcgccgttggttggcgccgtcacgacgcggcccccggcggcgttctcttcgttaaccgcaagcgcaaacatattcacccagtcgaccacgttcatcgggtcgttggagaatttgtccgtggttaccagcatacggcgcagagcagaggcacgacgcggcacgcgcagcggacccggcagaacgccttcggtgttcatcccgcgatcgatacaggcacgcatggtttgccagacgttggcaaaatagtcttcaatctcttgtttgctgtgcagggccagttcgttctgcatcaccatgccggagagggaaagaccggtttgtttgcagtagcccagcatctcggtcgctgatttgaacgggtacggcacgctgacgtcgccgacgctgtctttgccaaaatgctcttcatccacgatgaaaccaccgccgatggagtagtacgttttgctgtagatctctttttcaccgctgtaagcgtgaatggtcatgccgttttcatgcagcggcaggttgtcgctgcgaaaacgcatgccgtcatcctgcgggaaatcgacttcctgcttgccgtttgccagcagcaggcggccgcgtgtttccacgtcgcggatgaatgccggaatggcatcaatatcaacggtatccggcatattgcctgccagacccataataatggcgatatcggtgtggtggcctttacccgttaatgacagcgagccgtaaacatccacggcgacacgggtaacgctttccagtaatcctttttcgaccagatcatcgacgaactgtttaccggccttcatcgggccaacagtatgggaagacgaagggccaattcccactttgaacatgtcgaatatactaatcactttcacactcctgacagggttaccggggttccagtaacgatgttataactgcgcatagtgtaagagggaacaccgacctcggcttaactattcacatgaattaaactaatggttaacgatgggttttgctaatagcgcgacgcagatcgcaaacctggcagaagagggcggaatgtaaagtatagtcaaggtttcaggccgatctgcagcgccagttcacgaatgatgcccgccgtcatgccccagacaaaataatgctgataccaggacaaccagacccgatggtcatgcccacgacgctgaatatccagcgggtggtaacgactcagtcgaagggcttcatccagaggcatttcaaacaccgcagagacttcatcaacgctggcgtgatactgcagacccggcgggataatgcccaccaccggcgtgacctggaaaccggtaacgctgtcgacgggcggcagcacgccgatgacctcaacggcctccggcggaatggccacctcttcctgcgcttcgcgcagcgcggcggcaatcagcgaggcgtcggagctgtctaccgcgccccccggaaaagcgacctgaccggcatgcttgcgtaaatgggcggaacgctgggtgagcagcaggcccggctgtgcgcgacgcacgaccgggatcagcacggccgcctgacgctgattcagcgcttcgcggttgacctgcggtcttagtagctgaaaacgcgataaaaaatcatccagcgtcaggttctctttttccacccgtgattactccagtagtttcaggatacggttaactttatcaaaggtttcctgatattccgcatcgacctggctatcggcaacaatcccgcccccggccgaacagtaaaggtttccgttgcaggcggtcagcgtgcggatggtaatgctggtatccagcgtgccgcacaggctgatatagccgatgctgccgcaccaggcattgcgccggtggggctccagttcatcaatgatctccattgcccgcaccttcggcgcaccggtgatggagccgcccgggaacgcggcgcgaagcaggtcgcaggccgtacgcgagtcaggcagccgcgcggtaatggtgctgaccagatgatgcaccgccgggaaaggctcgacgacaaacagttccggcacgcggacgctccccggaacggccacccggccaatgtcgttacgcatcagatcgacgatcatcaggttttcggcgcggtcttttggcgaggcggcgagtttttctgcctgcttgcggtcggcgtcgggatcggcaaggcgtggcagcgtgcccttaatcgggcgggtttgaatggtcccctcggccaggtgaataaagcgctcgggcgacaggctgaggatcgccacctggtccagacggacaaacgcgctgaacggcgccttgttgctggcattaagacgggtaaacgcctgccactcatctccccgataggtcgcctggaagcgctgggcgaggttaacctggtagcagtcgccgctttgcagatacgcctgaacgcgcgagaatttttcgccatactccgcggcgctcatgttcgagcgccagccggaggtcagcgtgaacgtctctgcgggtgcagcctgttgcgcctcaagccagtccagacgcgcctggacgtcacgatggctcagcagggaaaccgtttttttcaggtgatcgacgattaacgcccagtcatacagccccacggccatgtctggcagggaaatatcagcctgcgcacgctcgggcagcgtttcgaaacggcggcccaggtcgtaaccaaacaggcccagcgcgcctccctgaaagggaaggtccgggtttggcgtagcggataagcccagcgcgttaatatcgtgctgaagctgcgccagcggatcgtccgtcagcgacaggtcatcggttgtcagcgtcttcagcggatcggcgaccagaatatcaaagcggctgtagggatggtccgcatggccggagtgcagcagcatcgcaaacggaagatggctcaggcgggcaaaccagtattcagcggcgtctgtccgccagggcagggtaataacagtggggaagcgcatgttcatgtgtggcatactaccgggcagcgtgaaataattagcgcgaataatttagcaggagttgacgatgtttgcaggtttaccttctctgagccatgaacagcagcagaaagcggttgagcgaattcaggaactgatgtcccaggggatgagcagcggacaggcgatttcccaggtggcggaagaactgcgcgccacgcataccggcgagcggatcgtggcgcgtttcgaggatgaagatgaagagtgatcgggcttaaaccgccgcgataatcttaatctcaaccttgtattccggtttcatcagcgtggcctgtacggtgcagcgtacaggcgcgtgacccgccaccacccacgcatcccaggctttgttcattgccgcgaagtcatctttgttcgccaggaaaatcgtcgcatccagaatgcgggatttgtcgctgccctgtttttccagcaccgcgtcaatctgcgccagggtattggccgtctgctcaaacgcatccgcgtcaaggttcgccgggacgccggtgtagtagagcgtctggttgtggatcaccacatcagaccagcgggcttcggcatcaatgcgcacaattgtcataaacgtttcctcgttatttttcgtcgtcaggcggcaagactgccatattgttctcgtgtcgtcactatttggggtggcacaggagaggatgggctgacataatccctgtgcaaaaatacagtgagagagcaccgtggcagacgatttttcccctgaaggtcaattagcgcaggctatccccggcttcaaaccccgtgagcctcagcgacagatggcgcacgccgttgcacgcgccatcgataaggctcagccgctggtggtcgaagcgggtaccggcacgggtaaaacctatgcttaccttgcgccagcgctgcgggcgaaaaaaaaggtgattatctccaccggttcgaaagcgctgcaggaccagctctacagccgcgatttgcccacggtggcaaaggcgctgaaatataaaggccgtctggccctgctgaaggggcgctccaactatctctgcctggaacgccttgagcagcaggcgctggcgggcggcgacctgccggtgcaaaccctgagcgacgtcattatccttcgcgcctgggcgaaccagaccgaagagggcgatatcagcacctgcgcgagcgtgccggaagactctcccgcctggccgctggtgaccagcaccaacgacaactgcctcggcagcgactgcccgctgtataaagactgcttcgtggtgaaagcgcgcaaaacggcgatggatgcggatgtggtggtggtgaaccaccatctgttcctcgcggatatggtggttaaggacagcggctttggtgagctgatcccggaggcggacgtgatgatcttcgacgaagcccaccagctgccggatatcgcaagccagtattttgggcagtcgctctccagccgccagctgcaggatctggcgaaagatttcaccattgcgtaccggaccgaactcaaagatacccagcagctgcagaagtgcgccgaccgtctggcgcagagcgcgcaggattttcgtttacagcttggcgagccgggctatcgcggaaacctgcgcgagctgctggcggacaaaaacatccagcgcgcgctgctgctgcttgatgatgcgcttgagctctgctatgacgtggcgaaactgtcgctcggccgttccgcgctgctggacgcggccttcgaacgcgccacgctctatcgcgggcggctcaaacggctgaaagagattaaccagccgggttacagctactggtacgagtgcacttcgcgccactttaccctggcgctcacgccgctgacggtggcggataaatttaaagaggtgatggcgcaaaagccgggcagttggatcttcacgtcggcaaccctgtcggtgaatgacgacctgcaccacttcaccgagcgcctcggcatcgagcaggcggaatcgctgcttctgcccagcccgttcgattacgaaaagcaggcgctgctctgcgtgccgcgcaatctgccgcttcccaaccagccgggtgcggcccggctgctggcagcgatgctgaagccgatgatcgaggccaataacggccgctgctttatgctctgcacctcccacgccatgatgcgcgacctcgccgagcagttccgcgccaccatgacgctaccggtgctgctgcagggcgaaaccagcaaaggccagctgctgcagcagttcgttagcgccggtaacgccctgctggtcgcaaccagcagcttctgggaaggggtggacgtgcgcggcgacacgctttcgctggtgatcattgataagctgccgtttacctccccggacgatccgctgctgaaggcacggatggaagactgccgcctgcgcggcggcgatccgtttgacgaggttcagctgccggatgcggtcattacgcttaagcaaggggtagggcgcttaatccgtgacgtcaccgatcgcggcgtgctggtcatctgcgataaccggctggtgatgcgtccttacggggcaaccttccttgcaagcctgccgcccgcaccgcggacgcgggacataaaacgcgcggtgcgtttcctggcaaacccaacggcggagtaatttaccccggagtgtgctaagatgcgcgccattttgtgactgacccttgcgagagcgcgacgactgatgcgaattctggctattgataccgcgacagaggcttgctctgttgctctgttgaacaacggtgctgtttctgcccatttcgaagagtgcccacgggaacacacccaacgcattctccccctggtaaaagccattttaacccagggcaacacctccttaaccgacctcgacgcgctggcctttggccgcggccccggcagctttacgggcgtacgcatcgggattggcattgcgcaggggctagcgctgggcgccgaactgccgatgatcggcgtctctaccctcgccaccatggcacagggcgcatggcgtatgaccggggcaacgcgcgtcctggcagcgattgatgcccgcatgggcgaagtctactgggccgaatacacccgcgacgagcagggcgtgtggcacggtgaagagacggaagccgtgcttaagccggaagcggtgacggaacggctgaagcagctgtccggcgagtgggcgaccgtcggtacgggctggccagcgtggcctgagatggcgaacgacaccgggttgacgctggtggacggcaacatgcttctgccggctgcggaagatatgcttccgattgccagccagctgctcgcagcaggaaaaaccgtggccgttgaacacgcggaaccggtttatttgcgaaacaccgtcgcgtggaagaaacttccgggccgcgagtgactctcagtaacaggaactgagaaaaaggagtcgcatcatggcggttcagactaaagtagtacgccttattatggcaggcgcggttgccatagcactgagcggatgcgtttccgttcctgatgcgattaagggcagcagcccgacgccacagcaggatctggttcgggtgatgaatgcacctgagctgtacgtcggccaggaagcccgctttggtgggaaagtgatcgacgtgcagaaccagcaggggaaaacccgcctggagatcgccaccgttccgctggacagcggcgctcggcctgtgctgggcgaggcctcccgcgggcgcatctatgcggacgtcagcgggttcctcgatccggttgattttcgcggacagctggtgaccgtcgtcgggccgattaccggcgccgtacagggcaaaatcggcagcacgccgtataaatttatgaccatgcaggtcaacggctataagcgctggcggctggcacagcaggtgatcatgccgcctcagccgatcgatccgtggatgtggggtccgcatccttatcgctacggctacccgggctggggctggtataacccgggacctgcacaggtacagacgatcgttactgagtaacttactgttattgttagaaaagagacagcggctcagccgctgtctctgtttttttacggataaaacgaaaaaaaagagtgacgcgcttcgcaaccttaaatctgaacaattaataaactggtacgctgagttaatataatgttaacaaactgtttattatcggggttgtgatgacgacgaacactcatttcagaggtgatgcattgaagaaggtttggcttaaccgttatcccgcagatgttcctgctgagatcaatcctgaccgttatcaatccctggtggaattatttgaacactcggtaaggcgctacgcggatcagcccgcatttgtgaatatgggcgaggtgatgacgttccgtaagctggaggagcgcagccgggcgtttgcggcgtatctgcaggaagggctggggctgcaaaaaggggatcgcgtcgcgctgatgatgccgaacctgctgcaatacccggtggcgctgttcggtatcctgcgtgccgggatgatcgtcgtcaacgtcaacccgctgtataccccgcgcgagctcgagcatcagctgaacgacagcggcgcggttgcgattgtcattgtgtccaactttgcccatacgctggaaaaagtggtcgacaaaacccaggtgaaacacgtcatcctgacgcgcatgggggatcagctctctaccgccaaaggcacgctggttaactttgtcgtcaaatacgtcaaacgtctggtgccaaaataccatctgccggacgctatctccttccgccgcgcgctgcatgcgggctatcgtatgcagtacgttaagccggaagtggtctcagaagatctcgcgttcctgcagtataccggcggtaccaccggcgtggcgaaaggcgcaatgctgacccaccgcaacatgctggcgaaccttgagcaggtcaatgcaacctacgggccgctgctgcatcccggcaaagagctggtcattacggcgctgccgctgtaccacattttcgcactgaccatgaactgcctgctgtttattgagctcggcggtcaaaacgtgctgattaccaacccgcgtgatatcccggggctggtgaaagagctggcaaaatacccgttcaccgctatgaccggggtaaataccctgtttaacgcgctgcttaataacaaagagttccagcagctggacttctccacgctccatctctctgcgggcggcggcatgccggttcagcaggcggtggccgagcggtgggtgaagcttaccggccagtatctgctggagggctatggcctgacggagtgcgcgccgctggtcagcgttaacccgcatgacatcgactaccacagcggaagcattggactgcccgttccttccactgaagcgaaactggtcgatgataacgataacgaagttgcgccgggtgagccgggggagctgtgcgtcaaaggtccacaggtcatgctgggttactggcagcgtcccgatgcgaccgacgaaatcatcaaagacggctggctgcataccggtgacatcgcggtgatggatgacgagggcttcctgcgcattgtcgatcgcaagaaagatatgatcctggtctccggcttcaacgtctatccgaatgagatcgaagacgtggtcatgcagcacagcggcgtactcgaagtggcagcggtcggcgtgccttccggcagcagcggtgaagcagtgaagatatttgtggtcaagaaggatccttctctcaccgaggaagcgctgataacgttttgtcgtcgtcagctgacgggctataaagtgccgaagctggtggaattccgcgacgagctgccgaaatccaacgtcgggaagatattacgacgagaattacgtgacgaagcccgtgccaaagtagacaataaggcctgagcttcacgttaatcgtccagacgccggttaagccggcgttttttatgggcgcaaacaaaagagaatccgatttgaattaccagatgatcacgaccaacgacgagctggcttcgctgtgcgaagtgacgcgcgactttcctgccattgccctggataccgagtttgtccgtacccggacgtactatccgcagctggggttgattcagatgtacgacggtaaacacgtgtcgctgatcgaccctctcggcattaccgactggacgccgatgcgcgatctgctgctcgataccgccgtcacaaaatacctgcacgcaggcagtgaagatctggaagtctttctgaacacctttggcatcatgcctcagccgctgattgatacgcagatccttgcggcgttcagcgggcgaccgctctcctggggctttgccgccatggtggaggagtatacgggcctgacgctggataaaagcgaatcccgtaccgactggctggcgcgtccgcttaccgcgcgccagctggagtatgcggcggctgacgtgttttacctgctgccgatcgccggacagctgatgcaagaagccgaggcatccggctggctgtccgccgcgctggacgagtgccgtatgacccagctgcgtcgtcaggaagtggtggatccgaaagaggcctggcgcgacatcagcaacgcctggcagctgcgtacgcgtcagctggcgtgcctgcagctgctggcagactggcgcttgcgtaaagcgcgcgagcgcgatctggccgttaactttgtggttcgcgaagaacatctctgggcggttgcgcgctatatgccgggcagcctcggcgagctggacagcattgggctttcgggcagcgaaatccgtttccacggcaaaaccctgctggcgctggtcgcaaaagcgcaggcgttaccggaagaggcgctgccggaaccgctgctgaacctgatggatatgccgggctatcgcaaagcgtttaaggacatcaaagcgctggtgcaggcggtggctacggaaagcaagctgagcgcggagctgctcgcttcacgccgtcagattaaccagctgcttaactggcactggaagctgaagccgcagaatggcatgccggaaatgatggcgggatggcgcggggaattgatagccgatcgcctgaatacgctgctggaaggttatccgcgataaaaatatgccgggtgataaacccggcatattcccccggtggcgctgcgcttaccggggcgacgaaatcacaaacctacggacgcgactcttccgcttccgggagcgtcacgttcagctccagaatcgaaatatccccgtctttttgttccagctgcaccgtcaccatctccgggtcaatctgcacgtacttacagatcacttccaggatgtccttgcgcagctgcggcaggtagtgaggctcggcgtcgctacgacgacgctccgcaacgataatttgcagacgttcttttgcgatgttggcggtgttctttttccgcgagagaaaaaagtccagtaatgccataacttatcctccgaacaggcgtttgaggaaacctttcttctcttcttctatgaagcggaaaggacgttcttctcccagcagacggtcaacggtatcggcgtaagctttacctgcatctgccattgtatcaaggatcactggctcgccctggttagaggcgcgtaacacggactgatcttccgggataacgcccaccagcttaatgcgcaggatctccagcacgtcttccatgctcagcatgtcacctttgttcacgcggcccgggttgtagcgggtgagcagcaggtgttctttaatcgggtcttcgccattttccgcacgacgggatttagaggcgaggatcccgagaatgcggtctgagtcacgcacggatgaaacttcagggttggtggtgatgattgcttcatcagcgaagtagagcgccatcagagcaccggtttcgatgccggcaggggagtcacagacgatgaagtcgaactccatttttttcagctcgtcgagcaccttttctaccccttcacgggtcagggcgtctttgtcacgcgtctgagaagccgggagaatgtagaggttctcggtgcgcttgtctttaatcagcgcctggttcagcgtggcatcgccctgaatgacgttcacaaagtcatacacgacgcgacgctcacatcccatgatgaggtcgaggttacgcaggccgatatcgaagtcgataacgacggttttctttcccttctgggccaaaccagtagcgatggccgcgctggaggtggtcttgccaacgcctcctttacccgaagtaacaacaataatgcgtgccatagaaattccttgttaaaaagggatcaattcaacggttgaacggtcaacgcgtcgtctgccagaagcaggcgagccgctttgccataaaattcggctgggatcttgtcgctcagccaatattcacctgcgatggacaccagttccgccgtcaggtgagtacaaaatatttgcgcgtcccgatcgccacttgcacctgcgagcgcacgtccacgcatcataccgtaaacgtgaatattgccatctgcaatcagctcagcgccagcactgacgtggcttgtaacaatcagatcacagtttggtgcataaatgcgctgaccggaacgaaccggcacatcaatcattcgcgtttttgtgatgtttgtaacgttttgcgccgcaggagggggcgtttcgacggcaacgggtgccgcacgcggggctttttctttgccttcattcagaagcggcagccccgcacggtcaatttccgctttcagttcagtatctttgcagccgctgatgccgacaatacgcagtccggtcgaggagacggcctgctggagacgtttccagttaaccggcgcttcaagaccgctgacgttgataacaacaggggcgtgcttcaggaaggcgggagcctgggcgattttgtcttctaacgcctgacgaataacctcgggttttgcatcatgcaaatgtaccactgataaggtgaagctactgcctttaagctcgatgggcgtgtttgacatcctggccttactcaatttgctattaaccgcaaccactcgctgcgatattccgaagagtatcaggcatgttatagtcaggagtatattgaggcaagcaaccacccattaattcagagtaaaaacatgttttgtgtgatctacagaagtacaacccgtgaccagacctatctttatgtcgaaaagaaagacgatttttcacgcgtgcctgaagaattaatgaagagctttggccgaccgcagatggcgatgctgctgccgctggatggtcgcaagaaactggtgaatgccgatctggagaaagtgaaaacggcattagccgagcagggctattatttacagcttccgccgccacccgagaatttattaaaacagcatcttgaggcgaacggtaaaaaatagtctcaactgtttttgagcacaacacatcaaccgtttaggggtcgaccatgtatcaacatcataactggcaaggtgcattactggattatcccgtcagcaaagtggtttgcgtgggcagcaactatgcaaaacatattcaggagatgggcagtgcgacgccagaagagccggttctgttcattaagcctgaaacggcgctttgcgatattcgccagccgctggccctgccgcaggggctcggctcggtgcaccacgaagtggaactcgccgtgctgatcggcgcaacgctgcgtcaggcctccgaagagcatgtgcaaaaagcgatcgccggatacggcgtggcgctggatctgacgctacgcgacgtgcagggcaaaatgaagaaagcggggcagccgtgggaaaaagccaaagggtttgataattcctgcccgatttcggcgtttgtgccggtgagcgaatttaccggcgatccgcaggatacgccgctcagcctgaaggttaacggtgaaatccgccagcagggcaccacggcagacatgatccataagattgtgccgctgatcgcctacatgagccgcttctttaccctcaagccgggtgatgtgatcctgaccggcacgccggaaggcgttggtgcgctcgcgagcggtgatgaacttgaagttggttttaacggcctgtcgctgaaaacccgcgtgctgtaacctcctcttgccgcctgaaaagggcggcaaaacttgcaacgacgtgccagactcgttataaggtgcgctttcttttgacgtgtggacatcctgatgaacgacatccctttctggcaaagcaaaactcttgacgacatgaccgacgcggaatgggaatccttatgcgacggctgcggtcagtgctgcctgcacaagctgatggatgaagacacggacgaaatctacttcaccaacgtggcctgcaagcagctgaacatcaaaacctgccagtgccgcaactacgagcgccgcttcgagttcgagccagactgcattaaattaacccgtgagaatctgcccacttttgaatggctgccgcatacctgcgcgtatcgcctgctggcggaggggaaaggtctgcctgactggcaccccctgctgaccggttcaaaagcggcgatgcacggcgaacgtatctctgtgcgccacattgcggtgaaagagtccgaggtgcgggactgggaagatcacatcatgaatcacccgacccgttgagattaaaaaacccgccaaagcgggttttttattgtgcgctgttgtgtcgggtggcgctgcgcttacccgacctacaaaaccgtaggcccgcgcaagcgaagcgccgccgggcgaattagcgtccgaacaaatcgcgcttcttcggtttgaacggctgagcgatcaacaccagcagcgccacgacgaagtaggcggcaaaaatgcctaccagccactgcggcatctccagcgtcaggaattcccactggcgaacggagcagtcaccggaggcaacgaacacctgcggcagccatttgtccagcggcagccagctcgggaagcgggcggcaaaatcgcaggtcataaacggtgacggatgcagctgcatcatcgtgtgctgccaggagagttcaatgcctttccaggcgctgtagagccagattgcgatcccggcatggcgaagcggcgacttcggcgcaatcgcgccgaccaggccagcccccataatgccgaacagcgcgcagcgttcgtaaatacagagcacgcatggtttgagtcccattacgtgctggaaccacagcgcgaccatttccagcgcaaaggcggtcagggccattaacaaccacgctccgcgaccgcgggagcactggtttaaaaatctcaacataatcatttccctggaacatgcttagaaagcgcagtgtaaacgaattcgtttttcgcgccacctgtacctggcgaaataaaacgtaattggatgtttatcgtgcgaaaaggcaaacgggcagcgaactgcccgagttgcagtgtttactgcgccgcaagtatacccgcttgtatcaaccattgcgtacagggaataagggtaattttgacgcaaagcaatcccacgatcgtaagcaccagcgtatagggcagggccatccagaccattcttccataagaaagacgtatgagtggcgcaagagcggaggtcagcaggaacaggaaggcggcctggccattgggtgtcgccaccgacggcaggttggtaccggtgttgatcgccacggccagcagttcaaactgtccggcgctgatcacgccttgctccatcgcggtcttagcctcgttaatgtaaaccgtcccgacaaagacgttatctgagattgacgagagcaggccgttaaacaggtaaaacagcgacagctgagcatccggcgatgcccgtaagacaaaggcaataatcggcgcgaacaggtgctggtcgattatcaccgccacgaccgcaaagaacaccgccagcagggcggtaaacggcagcgcttcggtaaaggctttgccgatggcatgctcatccgtcacgccggtaaaggcggtggcgagaataatcacggacagaccaatcagccccacttcagccagatggaacgccagcgcggcgataagccaggcgccgatgatcccctgtgcaatcaggcgcagcgtctcctggcgcgtccgctggcgtcggctctgcagatcgaatttatgcagctcctgacgtaccggctccgggagttgtgccccgtaaccaaagaggcgaaacttctccaccagcaaacaggtcgccagaccgcagatcagcaccggcacgctcaccggggccattctcaggaagaaatcaccgaagtgccagcccgccgctttcgcaatgatcaggttttgcggctcgcccaccatcgtcatcacgccccccagggcggtacccaccccggcatgcatcatcaggctgcgcaggaaggcgcgaaactgttccagtacctcgcggttatgcacatcgacatggctgtcatcctgcagatcctcacccggacgagaggaggccacgcggtgataaataccgtaaaaccccaccgcgacgcttatcaccaccgcgacgaccgtcagcgcgtcaaggaaggctgacaggaaggccgccgcaaggcaaaacgccagcgagagaaccgttttcgacggaatgctgagcagcaggcgcgtaaagataaacagcagcagctgtttcataaagtagatgcccgccaccataaacatcagcagcagaagcacttcaagatttgaagccagctctgctttgacatgctcggcagaggtcatcccaatcactaccgcttcaaacgccagcaatccgcccggcaacaggggatagcatttcagcgccatcgccagggtgaagataaactccgcgaccagcagccacccggcaacgaacgggttcacgtaaaagaggagagggttaacgaccaggaacaccagcagtatcagtttgtaccagtcaggagactggcctaaaaaattgcgccacagagcgcgcccaaaagaaatttccacgacagacgtccttccccgtcaagtaagacaaaacatcagtatacgcaaaattcacggtccagacgcggataagtctgcattgtaaatttcataaaaatgaaacggcgatccctcttttctctctttgccgcgctacctgccactgcacgcctctggtatgatgagtccaatttgcaaaagctgtgtaatggaaatctcactatggtcattaaggcgcagagcccggcgggtttcgcggaagagtacatcattgaaagcatctggaataatcgtttccctgcgggttccattcttccggctgaacgcgaactctctgaactgattggcgtcactcgcaccacgctgcgtgaagtgcttcagcgactggcgcgcgatggctggttgacgatccagcacggcaagccaacaaaagtgaacaacttctgggaaacctccgggctgaacattcttgaaacgctggcgcgtctcgatcatgaaagcgtgccgcagctcattgataatctgctctccgttcgcaccaacatcgcgacgatctttattcgtacggctttccgccagcatccggaagatgcgcttgcggtgctggccagtgccaacgaggtggaagatcacgccgacgcgttcgccaccctcgattacaacgtcttccgtggcctggcgtttgcctccggcaacccggtgtatggtctgatcctcaacggtatgaagggactctacacccgcattggccgccactactttgccaatcccgaagcccgcagcctggcgctgggcttttaccataagctgagcaagctgtgctccgaaggtctgcacgatcaggtgtatgagacggtgcgccgctacggtcacgattccggtgaaatctggcaccgtatgcagaaaacgctgccgggtgatttggcgattcagagccgctgaaataaaaaacctctcgtgtgagaggttttttttcgtcgggtggcggctgcgccttacccgacctacgggtcttgtaggcccggtaagcgtagcgccacccggcaaaaaactacagcgtattcaaccgcgccgggcagcgttcaagcagctcgacgctcccgtcttcattctgctgctccagctgcacgtcaaagccccacaggcgatgcacgtgcttcagcacctctttacgccctttatccagcggcgcgcgattgtgcgggatatagcgcagcgtcagggagcggtcaccgcgcaaatccacgttccacacctgaatgttgggttcaagattgctcaggttgtactgggaagagaggcgagagcggatctcacggtaaccctcctcgttgtggattgcggagatctccagatagttgttgcggtcgtcgtccagcacggtgaagaagcggaagtcacgcatgatcttcggcgacataaactggctgatgaagctctcatccttaaagtcgcgcatcgcaaagtgcagcgtttccagccagtcagatccggcgatatccgggaaccagtacttgtcttcttccgtcggcgactgacagatacgcttaatgtcctggaacatggcgaagccaagggcatacgggttaatcccgctgtaccacgggctgttatagggcggctggaacaccacgttggtatggctgtggaggaactccatcataaaccgctcggtgactttcccctcgtcgtacaggtggttgaggatggtgtagtgccagaaggtcgcccagccttcgttcatcacctgcgtctgtttttgcgggtagaaatactggctcaccttgcgcacgatgcgcaggatctcacgctgccacggctccagcagcggggcgttcttctccataaaatagagcaggttttcctgtggctcggacggatagcgccgcgcttcggcgatcgttttttcttcctcacgcttcggcagggtgcgccacagcatgttcacctggctttgcagatactcttcgcggcttttctgccgggccttctcctcctgcagggagattttctgcggacgtttgtagcggtcaacgccgtagttcatcagcgcgtgacaggagtcgagcagtttttccacttcgtccacgccgtagcgttcttcgcagtcggtaatgtatttacgggcgaagatcaggtaatcgacgatggagctggcatccgtccagctgcggaacaggtagttattcttgaaaaaggagttgtgcccgtagcaggcgtgcgccatcaccagcgcctgcatggtaatggtgttctcttccattaaataggcgatacacggattggagttaatgacgatctcatacgccagaccctgctgcccgtgtttatacagccgctccgtttcgataaatttcttaccaaacgaccagtgcggatagttaatcggcatcccgacgctggagtaggcgtccatcatctgttcggacgtaatgacttcaatctgatggggataggtatccaggcgatacagttttgcaacccggtcgatttcggcgaggtaaacatccagcagctcgaaggtccagtcgggtccatcgctcagacgtgtgttgtccttgttcagggaatcaatagtagccattagcgcgccctcgttgtgggtgctctctctgtctggagagcctcctttcaagcatagatcaacgtgttaaaaagcgtgctggggcagaaattttttctttgcgatttcgcgtttttgatacggcaaaaaaagcgtccctcagcattttatgctggttaaaaataacgcgcagcaggagatcccaaattagcactatcccctgatgctgggggatgtgtgaggtaggtcaccataaaaaagtcgtatgttgaataatattttcaactaggttatcaatctgtaattagaagattgttcttttgcacataatggagtggctatgcgtgttgtcatactgggaagtggtgtcgttggggtaaccagcgcctggtatttaagtcaggcgggacatgacgtcaccgttatcgatcgtgagtcaggccccgcgctggaaaccagcgcggcgaacgccgggcaaatctctccgggctatgcggcaccgtgggcagcgccgggcgttccgctgaaagcgattaaatggatgttccagcgccacgcgccgctggccatcagccttgacggcacgcagttccagctgaagtggatgtggcagatgctgcgcaactgcgacacccgccactacatggagaacaaagggcgcatggtgcgcctggcggaatacagccgcgactgtctgaaagcgctgcgcgcctcaaccgggattgagtacgaaggccgtcagggcggaacgctccaactgttccgcaccgaacaacagtatgaaaacgccacccgcgatatcgccgtgctggaagatgctggcgtaccgtatcagctgctggaagccagccagcttggtcaggttgaacctgcgctggcggaagtggcgcataagctgacgggcggcctgcgcctgccgaatgacgaaaccggcgactgccagctctttacgcagcgtctggcgcagatgtgcgagcaggcaggggtgaaattccggtacaacacctctgtcgacaagctgctgtcggaaggggaaaaaatttacggcgtgaagtgtggcgaagaggtgatcaaagcggatgcctacgtcatggcgtttggttcgtactccaccgcgatgctgaagggcattctcgatattccggtctacccgctaaaaggctactcgctgaccattccggtaaaagaggagagcggcgcaccggtttctaccattctggatgaaacctacaaaatcgccattacccgcttcgataaccgcatccgcgtaggcggcatggcggagatcgtcggcttcaacaccgaactgctgaaaccgcgtcgtgaaacgctggagatggtggtgggggacctcttcccgcgcggtggctttgtcgagcaggcgaccttctgggccggcctgcgtccgatgacgccggacggcacgccgattgtcgggcgcacgccgttcaaaaacctgtggaccaataccgggcacggtacgcttggctggacgatggcctgcggctccgggcaactgctgagcgacctgatttccggacgcacgccggccattccgtttgacgatctcagtgtcgcgcgctatcaatcggggtttacgccttcgcgtccacagcacctgcacggcgcgcataactaaggagctgtcatgtcccgtcctgttctcgctcagctgaacctgcaggccctgaaggataacctgcagattgttcgtcgggcagcacctggcgcacgcgtgtggtcggtggtgaaagcgaatgcctacggccacggcattgaccgtatctggagcgcgctgagcgccaccgatggctttgcgttacttaatcttgaagaggctattctgctgcgcgagcgcggctggaaagggcccatactgctgctggagggcttcttccacgccgacgatctgccgctgctggataagtaccggctgaccaccagcgttcacagcaactggcagatcaaagcgattcaggatgcgaagctccacgcgccgctggatatctatctcaaggtcaacagcggcatgaaccgcctgggcttccagcctgagcgggtgcatacggtctggcagcagctgcgcgccctgaagaacgtgggtgaaatgacgctgatggcgcactttgccgacgcggaaaaaccggacggtatcgccgatgccatggtccgcattgagcaggcggcagaagggctggactgcccgcgctcgctgtccaactcggcggccacgctgtggcatcccgaggcgcattacaactgggtgcgtccggggatcgttctgtacggcgcgtcgccctcgggccagtggcaggatatcgccaacagcggcctgaagccggttatgaccctgcgcagtgaaatcattggtgtgcagaccctgaaagctggcgacacggtgggctacggtagccgctatcgggcaaagggcgagcagcggattggtatcgtggcgggcggctatgccgacggctacccgcgcattgcgccgaccggcacgcctgtgtgggtcgatggggtccgcacgggaacggtaggcaccgtatctatggatatgctggccgttgacctgacgccctgcccgcaggcgggcatcggttccccggtcgagctgtggggtaacgaaatcaaaattgatgacgtggcggccgcggcgggcacggtagggtatgaactgatgtgtgccctggcaccgagggtgccggttgtgacggtgtaacgtatgttcgccgggtggcgctaacgcttacccggcctacgttcgagggttttgtaggctgggtaaggcgaagccgccacccggcaaaaaaaccgctactccgcttcctcttccatcggcctcaaaccgactttccttaccgcgttatcttctttctctgctaccgtccagatcatcccggcaaactctacctgatcgcccacgaccggggcagcgccaagtcgctgctggatgatttcgcccagcgtttgctggctatctccgtcttcagcaccttcatccaggccgtaaatcagcgccacatcggcaaacctggcgctggcttccagaataaaatcgccgaagaaacgctggtccagcgccaccggcggcgactggctgaacagcttgcccagcgcgggcaggtcacgctcgcggccaatcacgcagagaatatccccttcgcgcaggcgtgtgctgccggtagggtgcaacaggacattgtcgcggaacagggcggcaatgcgcgtttcggccggcatgtgcaaatcgcgcagcgaagcgcccacgcaccatttgtcggcgctcagctgatagacgaactgctcccacgggttttccggatgaatgtcgagccccacccgcgacaccggccagcccacgggagggaccaccacttttgcttttttcgccgcccacccgagggacgttccctggaacagcagcgaaatcagcaccacgaagaaggccacgttaaagaacagccgggcgttatccagaccggccatcatcggaaagaccgcaagaataatcggaaccgcgccgcgcagacccacccagctgataaagacgcgctcgcgcaggttgaagccgcgaaacggcagcaggcctgcaaataccgacagcggacgggcgaagaagatcatccacgcagacaacagcagcgccggaacggcgatgggcagcaggtccgatggggtaaccagaagaccgagcaccaggaacatgccgatctgcgccagccatgccaggccgtcgaagttctgcaaaatggcatggcggttgcgaatagggcggttgcccatcaggaacccgcagagatagacggcgagaatgccgctgccgtccagcgcggtggtaacggcaaaaataagaatgccaccgctcaaggccagcagcgggtaaagccccgcgggcagcgagatgcggttgatcatctgctgtaagaggtatccccccgccaggccaataacaatccccagcccgaactgctgcaggatatgccacgcaaacatccagctgaggcccgtctcgtgctgctggatcatctcaatcagcgtgatggtgagaaacaccgccatcgggtcgttgctgccggattcaatctcaagcgtggagccaacgcgttcgttaagcccttttccgccgagcagggaaaacaccgcagccgcatcggttgagcccacgatggcgccaatcagcaacccttccatgatattgagatggaaaagccacgcggccatcattccggtgaggccggaggtaatcaacacgccgaccgtggcgagcgacagcgcgggccctaaggccacgcggaaggagctcgcctgggtgcgcatcccgccatccagcaggatcaccgccagcgccaggttactcaccatgtaggcgaaagggtagttatcgaatgggataccgccaatgccatcaatgccggccagcatgccgatggcgaggaaaataacaagaataggtatgccgagacgcgatgaaaatgaacttaataaaatactgctggttacaaggaccgaacccagaatgaaaaggctgattatcgctgcggcatccaatgttctcttactcccacctcaatgttaacgctgttactaaaaccctaacatattaacgacggcaacagcgttttattaagggggtataacggcttttttatgcctttatgacaggatggccgctgatggtcagccgggagccggaatcattatggagcagggaggcgtgcgcgcccagcgccagggtcacggtgcgctgctcatgaccgaagtccagaccggcgatcaccggaatatccagccgcgagcgaatgaactcgaccatggtttccagggagtaacccgcgtcatagtcattcggggcagcgccgctgaagctgcccagcacaatcgcggactggcgctcaagaataccggcatgatagagctgcaacagcatccgttcgacgcggaacggatgttcgttgatatcttccagcaccagaatgccgttttcaatgttcggcatccacggggtgccgatgagcgaaaccagcatcgccaggttgccgccccagagctgaccttcgcattcccagtgcggtccattcccctgccactccacgctgtaggtgggattacgcagcgcgcgccagaaatgttccacggtgaacgcttccagctccggcgcgccgaagttaccggccagcatcgggccgctgaaggtgatgacgttatgcagcgccagcagcccaagctggatgacggtgaaatcgctgtggccgcatatcagcagcggatcctgctgctgacgctgcgccaggccctgccagtcaatgctctccagcagccggcttgcgccatatccgccgcgcaccgccagcacaatctggttttcacccttcaggttcgccaggctgttgatatcattcagccgctgcgcttcggtaccggcaaaacgctgctggcggcgggggataatcgtctgattttctaccttgtggcccgactccagcaaacgctgaacgccccgctgcgccgcgtcctggttaatgcagtagcccgacggcgcgataagatgaaactgagacatggcaattccttgctgaatgagaaactaattgtctatatcatgccgcttatacgccgcctgcttcaagagcggcgcaccgcgatgaccggctataaggatagatgacgtgaaattgagatggtttgcttttttgattgtgttgctcgctggctgtagttcaaaacatgattatcaaaacccgccctggaacccggaagtgccggtgaagcgggcgatgcagtggatgccgatcagtgaacaagccgggaaagcctggggcgtcagtccgcgcctcatcacggcgatcattgcggtggaatccggcggtaaccccacgcttgtcagcaagtcgaacgcggtggggctgatgcagcttaaagcgtcaacggcggggagagaggtataccgctacatgggctggagcggccagccgtcgaccagcgagctgaagaacccggagcgcaacatttcaatgggcacggcctatctgagcatcatggagcatggcgtgctgaaggggattcaggatccggaggtcatgcagtacgcgctggtggtgtcttacgttaacggcgccggcgcgttgctgagaaccttctcctctgaccgcaaagaggcgatagaagagattaacggcatggacaaagacgaattctttgagcatgtggtgaaaaatcacccggcaccacaggcgcctcgttatatctggaaagtgcagaaagcgatggatgccatgtaatgccgcagacgggcggcggtcacgctgcccgatgtttttttacagaactttatttgcgcgttcgcgcgcctcccgctccagggagtagataatgcgctgcagttcgcgctcagcgccaggtccgacgttgaggaaacggaagctcaaacgcggcgtggtgatcgtttcatttttgctgtccacgacggtgcgttcgctgatggcaatcagctgtgcatcgaaataaaagcgcccccagccacccatatccagctcgatttgcgtgaaccgcatgccctccaccagtccgtcaggcttcggcgtatccatcagcgcgcccataccgcccagcgacagatcgaagagacggaagcgaatctcttttttgtccggcattttggccttgcagaagtaggcagggtgaagcggggcgctgatgcggaaatattcacggcgctggacaaaccaaagattagtgggaagcggggtcacaaaggccggcagcccctggtattcgctcagttccagtcgcgacaggacaaactccactttggcgccctgcgtttcggccattacggcgatattctccgccttcagcgccgcgcggttttcatactcctggctgcctaaatcaatcaccagccgctcctgtgaggcgtcaaggatcttactgatgaactgattattcgaccagctgatgcgcagcggcacttcacctttttgcaggtcgcgtaatacccctaatacagccagcggattttgcttgaggaactgctcactgtaatgactcacgccggatggctccttgatagatgacagactgtcttagcgttatcggcaatctgcaatgaaacttaatacaaaccggtgagtttttttgcctgttcaggcaaagataagtcggtgacaagaaaatgattttccggcgatgacctatacttaagttagctgtgcagaaggttttctgcacatgcgttaaacctgcaagagggcatcgctatgggtatcatcgcctggattatctttggtcttattgctggcgctatcgcgaaattgatcatgccgggaaacgatggcggcggctttattttgacctgcgtactcggggtcgttggtgcggttgtgggcggctggctggcgacgatatttggcttcggaggcaacataagtggttttgacctgcacagttttctggtcgctgtcgtgggcgccattgtggtgctgggcatattcaggttactgcgacgagcataagataacgtaaacggctctctgcggagggccgtttttttacctgagtattgatttgttaatgtaaatgataataattgtcgttccgtattgcatctaacaacaagacgacattatgactccctctcgttttacgctttgcgccctggcaggcgccatcacgctcgcactgcacgctccggcattcgccgaagaatccactatcgtcgtcacgggcgcagagcagggcagcgcgctgccggcctggacgaacagcgccacgaaatcggccgtagctgaaagtaaaacgccgcaggtcatcacgaccctctctgcgccggaaattgacaagcgccatgcgaattccgtgaatgaaatcctccgctatgcgccgggcgtttcaaccgaagtgcggggaaatacctcctacatgagcgaatataaaattcgtggctttaccgtcgaccaggagttctacaacgggctgcagttaccctataacgtcaccggcaataccaaagcgcgcatcgatccgctgttgattgacagcgttgatatcctgaaaggcccctcatcggttctctacggcggcggctcgccgggcgggctggtgaatatccagagtaaaaagccgcagcgggaagcgcgaaccgaattcggttttgacaccggcaaccgcaacctgaaagagggctatctcgactcaaccgggcagattgccaacagcgactggaactaccgcctgctgggtaaagcgacggaaaatgacgatcagccgcacaccacccggtatgaaaactacctggttgccccgtccgtcacctggcaacccgacagcaaaacccgcctcaccctggatgcgctggcgcagaactccccgagcctgacgccgtctaacccgcttccgatcgcctacctgcgctcgacatacgcgggcaagcgcgattacgccggtgatgagtggagcgggtttaagcagcgtcagtggatgctgggctacagctttgagcatgagtttgacagcggctggggctttaaccagaaggcgcgctatttcgacgtcgacacgcatcagcgcagcgtctatgcaacgggaacgggaagcgaggtttatcagctcaaccgttttgcctacaccaccgatgaagatctgcagagcttcaacatcgataaccaggtcaccaaaaccgtggcgctgggtgactggcaacaccatctgctggccgggtttgactatcagaagctgaactcccatttccactaccgttacgcgtcgaccacgccgggcatggatatgcgcaatcctgactattcgcaaatcagcgaaagcgcattagggctgtataccgcccagaaaaaccgtctgagctatcagcagaacggctattacctgcaggatcaggtggagtttggcggcttaaatctgctggccagcctgcgtttcgatgattatcgctccgttaccaccaattatctgcaaaacggtgataaggcctgggtatcgcaggatcgcgtcaccaaacgtctgggcgcgctttacgcctttgataacgggatttcgccgtttatcagctattccgaaggttttgcgccggtgtcgccgcagggcacgctcgtggcgaaagacgtcaaaccgaccaccagcaagcaggtggaaggtggggtaaaatatctgctggcggattacgccaccacctttaccgcctcggtgtttaacatccgccagaaaaatgtcgttacctccgatccgggcttcctgaactatcgtcagaccggggaagtggaatccaaaggggcggaactgtctgccatcagccgcccgacggacaacctgacgctgattgccaactacgcctacacccacgcgatcaatacggaagatgacaagtacaaaggtaaacgtccaacgcaggtgccggagaatgccttcaacctttggggggattacacctttgaaaacacaccgctgaaagggctgatgctgggcgcgggcgcacgctacaccgggccaatggaaatctcaccggctaacaatgcgggtaaactggggggcagcacgcagtacgatttgtcggcatcctaccggatgggtgaaattctgccttcgctggccgggctgacgcttaaggccagcgcgcagaacatcaccaacaaagagacgctgacctgctacgacgcgaccaactgctggattgggcgggacagaacgtatcagcttggggcaagttacagtttctgagcaaggccctgtgagggcaaaaagtaggccgggtaaggcgtagccgccacccggcaatactcccttactgcgccgaggctttcaccggcgccacctcatcattcgccgcaggccgattctccggcacgctgtcgcacggtttctctttcgggcagacccggtccagcatcttcagcgtcacgccgttgctccagccgaagccgtcctgcagcggatactcaccgccgccgccgcccgtaccggtggtcgacacgtcatacttctcgaccagtttcttttcccggtcataggtatgctgaacgtttttcaggaagcgccaggtcacatccatcgagaccttctcttgcccgtaattctgcaacccttccgcggccacccattgcagcggagcccagccgtttggcgcatcccactgctggccgctgttgacggtggtggtcgctatcccgcccggcttcaacagacgagaggcggttgccgcggcgactttttcggcacgatcctgcgccgccgccttgacgtaaagcgggaacagggccgccgccgtgagctgattgcgtaccttcttgctcttcaggtcgtaatcggcgtaccaaccctctttatcattccacaggtggctctcgatggctttctggcgcgcggtggccagcgtctcatacttgcttgcgctggcggcatcaccgctctcctggcttgcccgggccagcagtttttccatcttgaacatcagggcgttcaggtccacgggcacaatgctggtggtccggatggtgccaagtttttgcggatcgtccatccagcgggagctaaagtcccatcccgaggccgcggcggaacgcaaatcacggtagatctcggttgccggtcggtttgggttacttttcgcggtgttcacatcgtcaagccaggactccgggcgcggggtgtcgcggtcgtcccagtagcggttgaggacagcgccgtcatccaacttcaccacgcgtttgttggcctggcccggctgcagggcatcgacgccgtccatccagtaggcatactctttctccatctgcggacgatatttcttcagcgcgtcgctgtcatgggtcgccagcagttcaaccatcagtgagaaaaacggcggctgggaacggctcaggtaatagctgcggttgccgttgggaatgtggccgaaggtgtcgatctcatacgcaaagttatccaccatgtcgctgattttgtcccaatgatcgctctcagccaggcccagcatggtgaaatagctgtcccagtagtagacctcgcggaaacgaccgccgggcacaacgtagggcttcggtaacggcagaagggaatcccatttgttgctggctttatcggtagtgcgcgtcagtacgggccagagatcgtcaatatgctcacgtaaactttgtccagcaggcggaacatatttttccccttccgcagggagcgtaaagttcatctcgacaaagtggcgtaagtcaaagctggactgcgtgtgctgcatgcggtagtccgccagaatcatcagcgggtcgcttttggggacggcatccgcaaaggttttctgatcgggaaacagtttggcgctctgcacgtcgttaaacagagggccaagtaaaatatcgggtgaggttgtctgggttgcggggttatcgtcggcatagcccagtgtcgttacgccgagcagcgcgccgcctaacgcaaggggcaaaaacgcggggcgtagtgtacgaggtcttatcatcagttcgtctcctgtcttcactaaacagcgtgaccgctgttgtcaatcacctgaaaaccttagacgaatattgcccgcttcgcgttaaatattgccgcgctttcagacctcttccgcggtctggctggcttcccgcagcgtgcccggcgcatggccaatgatgcgcttaaacgcccggctgaaggccgccagagagccgtatcccagccgcagcgcgaccgtttcaatgggctggttttcatgacgaatatactgaatggccagccgcattctcagctcgctgagatattttgccggggtggttcccgtcgccgcgagaaagcgttccgcgaaaacggagcgggacgtgcctgcttcttttgccagatccgccacgctccagttcaggcctggctgctggtgcatggcgtaaatggcccggctcaggcgcgggtcgcgcagcacctgcacccagccggtggctttgccacagccgccttcaacccagccccgcacaattaacgccgccaccacgtcggccagccgcgcaaggatcccggcatacccggcctgacgcgccgcggattcccgctccatcgccgccagcagcggatgaatttccggccaggtggacatcagccggctaaccatcatcacttccggcatcgccttgatcagcggctgcatcccgcccagctcaaaatccatgcacccgctaaaaatgagggtgttctcgctctccgggcagggctcgcaggtaatggcgcagaccgagctgcagataggctcgctcgggaaggcgttgaccggggtaagggtggcctgctcgtcagagagcaaagcgtgggaattcccgccgggaataaagagggcgtcgccgccgctcagttcgaacgttgcgccgctctccatgcgcagcagggcgctaccgtggctcacaaaatggaactgtgcccggccgggagcctgatgaaacgcgacgccaaagggcgcgctggcttcaatccgccggtatttcacgcctgacaggcgcatgccccgtaaaagttcgctgatcaaatcgggtgactgtacggtcatggcgcaactccggacgaataatcaataagtggagattatatgtcatagatcgtccagggtgaaccttctattcttttgcgacagtagtcacatttttataacgggagatcaacagatgagttcatgtgtcgcggcgagcgaggcggtagcgcctgcaaaacccgcctggcgggccgtctattcactggggctgggggtatttggtttgattacggcagaatttctgcccgccagcttgttaacacccatggccgcgagcctgggcgtgaccgaggggatggccggacaggctgtcaccgccaccgcgctggtggcgctggtcaccgggttgttgatcaccccggcaaccaagagtatcgaccgccgctgggtactgatgtttttctcggtgctgcaaattatctccagcctgctggtggcctttgcgcccaacctgcacgtcctgctcatggggcgtctgctgctggggatagccatcgggggattctgggccatgtcgacggcgacaacgatgcgtctggttccggcggataaagtgccgaaagcgctggcggtaatcttctccagcgtatcaattgccacggtggtcgcggcgccgctggggagctatcttggcagcctgattggctggcgcaacgtgtttatcctctgcattctgccaagcatgctggcgctgctgtggcagctctgggtgctgccgtccatgaagccggagagcagcggtagcctgagtacgctgttccgcgtgctgcgtcgtccagggatgatcggcggcatgctggcgaccattctgatcttcagcggccatttcgctttctttacctacctgcgtccgttcctggagacggtggggcaggcgagcgtggaaaccatttcactgatcctgctgggctttggtatcgccaactttgtgggcacctccgtggccggacatctgctggcacgtaatctgcgcctgacgctggcgctggtaccgtttgcgatgggcgttctcgcgctcatgatggtcgcctttggtcatctggcgatgctggacgggctgctggtcgcgctgtggggctttgcatttggtctggttccggtgggctggtcaacctggcttgcgaccaccgttccggatgaagccgaaagtgcaggggggctgctggtggcctcaatccagctggcgataagcgccggtgcggcaggcggtggggcggtatttgatcttaacggtgccagcggcgtgttcgcgggcagcggtttgctgctggtgacggcgatggtgattgtgtttatgggtgtgaaagtgaaagcggagtgattttttagccgggtgagcattcgtgccacccggcctcaggcttacagccctttcttatccatcaataccgccagatccaccaggcggttagagaagccccattcgttgtcataccacgccaggatcttcaccatattcccgccaatcaccagcgtggaaagcccgtcgataatcgaggagcgcgggtcaccctggtaatcgctggagaccagcggctcatcactatagcccagaatgcctttcagaggcccgctggcggccgcgttgcggaacgcgtcattcacctcttcggcggtcacgttgcggctcagcgtcacggttaaatcgacaatcgacaccaccggcaccggcacgcgcagggagtacccggtcagcttgccgtccagggaggggatcactttccccagcgctttcgccgcgccgctggagtagggcacaatcgacagcgccgccgcgcgggcgccgcgcagatctttgtccggctgatcgtgcagcgcctggctgttggtgtaggcgtgcgtcgtgttcatcaggccatgctcaattccgaactgctgatgcagcacctgagcggccggtgccagaccgttggtggtgcagctcccgttgctcaccaccgcgtgccgggcgggatcgtactggtcatggttgacgcccatcacaatcgtcaggtcgtcgttcttcccgggggcggaaatgatgatgcgcttagcgccgccgtgggtgatatgcaccgccgctttctcccgctcggtaaagaagccggtggcctcaatcaccacgtctaccccggcatcacgccatgggatattcgccgggtcgcgttcgctaaaaaccacgatccgctggccgtctacctgcaacgcaccgtcacccgcttcaacgggcgcgggcagtttgcccagaagggaatcatgcttcagcagatgggcgagggttttactgtccgtcagatcgttaatcgccacaatctgcagatccgggttgcccagcgccgcgcgcaggacattacgtccgatacggccgaaaccgttaataccgaccttaaccatggtgcactccttatctctgttgtctggagtcactgtaggcgtctggccggctggcgtaaatgacaaaaaaggatcagattacgccatcttgcggcaatgaaagcgctggcggtattcgccgggggtgaggtgaagctgtttctcaaagatgcggcgtaaattaatgctggtgccaaagccgctttgctccgcaacgcgctcaaggggatcgcgggtttgctcaagcagctggcgggcggcggccagacgcgcttcggtcacgtagcgggcaggcgagaccccggcctcgcgggtaaacacgcgggtgaagttacgcgggctcatcgccgctttctcggccagattttccacgcacaggtcggcggtgaggttctgcaggatccagctttgcacttcgcctatcggccctgcggtgccaggctgctgcaggctgtagcggctgaactgcagctgtccgccgggacgtcgcaggtacatcaccatatcctgcgccacgtcgcgggcgagggtaaatccgtagtcgtcctccaccagcgccagggtcaggtcgaacccggaactcacgccgccggaggtccagatggggccatcctgaatgtacagcgggccgccttcgacctggattgacgggtactgggcttgcagggtctccagcagccgccagtgggtggtggcgcggcgaccgtcaagcaagccggtctgggccagcagcatcgcgccgccgcagatagaggcgatccgccgggcgtgcggcgcagcgaggtgcagccagtccaccacggctatgctctcctgctcgtttataccgcgtccggtgatgataatggtgtccagcggttcgcgcggatccagctccggcagacgatagtccgccagcaggttcagacctgactggccgtggatcacctggtgaggctgcgtggtagcgatgataatccggtagcggggatgcgccagcccttccggatgcagccggttggcctgcatcagaatgtcggcgataccggcggcttcaaacagcatgccgccgtcgggaacgataatcaggatcttcttcatgtcctgaaaagtacctttaatacagaataagtcaagcgtgcccgcacttcacgtttctggcaaagcaaagcgatttaagttgtttgtgatttcaggcgtaatccccgatcgtcagggcactgtctctggcgaaacggcgtctgaaggaatgggtaaacgaagctccctctatttacatccgcaacaacgcaatcaaattcaccgcctcgcgtcgggtttcttatggcgaagcgaactgcccacctggctggtaatgttcacgatttatgcgggctggtttgccacgctggcgttctggcaaacgctcggcctgctgcccgccacgctgctgctgatcgggtttaccgcctggtatatgtccctgcagcatgagcttatccacgggcatcccacccgttttgcctggcttaaccaactgttcggcacgctcccgctggcggtctggtatccgtatggcctctaccgggattcccatctggcccaccatcggtacgatagcctgacccatccggtggatgacccggagtcgtactattttaccgaggcgagctgggcgcgcttttccccctggcagaagcgcctgatccgggcccggaatacctttgccggtcggcttctgctggcgccgctgctggatatcgtccagacgctgggcagcgccggggcggcgtttcgtcattttcacctgcgggcgatgacaatgtggctggttcacatcacgctgctggtggcacttttcgcctggatgacgcacgtcggtttttcccccgtctggttcgtgctggcggtcagctatccggcgctggcgctgaccaaggtgcgatcgtttctcgaacatcgcgcagcggacgatcccctggcacgctccgtcattaacgaggccgggctgttctggcggatactgtttttaaatctcaactaccattcagtacatcatgatttaccgggggtgccgtggtacgggctgaaggcgatctaccagcaaaaccgggaggcgtaccgggagcgaaaccgcggttttctcgtcaggggctacggtgaatggctgcgccagttctgggccaggcccgtcgacgtcaccattcaccccggaaaacaacaggaggagggatatgagtaacctgctggcgtttcccatgtatgcggtggatcgcgccgacacccgcgcgctctggctggcggtaaaggggctgctggccgctcgcggtgtgcccgtcgaagatgttcccgacgggccggagtccgatctgctgacccactggcgacagcctgcgcttgtcctcagccaggcctgcggttatccgctcgtcacgcagctttcggacgtgcaggtcgtcggctgttttcactacgcggccccgggctgcaaagggttccactaccgcagctttctggtggtgcgcgaggaggatcgccacctcacgctggcggattttcgcggccgacaagcggtctgtaactctgcggactcgcagtccggctacaatgcgctgcgaaaaaaagtggcgcctctggtggctcaggagccgtttttcgcgcaaacgtcctttagcggcagccatcgccagtcgctgaaggatgtcaaacgcggggcaggggatatcgcggccatcgactgtgtcacctgggcactgttgcagcgtcacgaaccggaaagcctgacgggtctggcggtcattgaccgtaccccgctgacgccagggctgccgctcattacctcgccccgcacctcgcctgagaccctgaacgcccttcgcgatgcgctccacgcgctggtgagttcgccggagcaccgggccgtttgcgacgcggtgctgatccgcggttttagcgtggtgacgcgtcaggcctacgcctcattgctggcgtgatagatctcctgcgcgtcggtaaaacagcgcagcgccagcgaggagacgggtttctgccggcgcataatcaggccgacaggggcctcgatatccgcgtcggcgatggggacaatcctgaaatggctgttcaactcttccagtccgttgttcagcggcatcacggcacagcacacgccgctttgcaccgcctggatgatctggaacgtggagtcgctctcgaaaacggacctcggttcaatgccagcagacttaaagctggcctccatatgcgcccggtaatgcatccctttggtcaggaaccccagcggaaaatccgtcagatcgcgccaggtcaatgtctcctggccgagctggaaatggcggacgtcgtgcagcaggcccatcttcgttttgggaagctggataatatcgaacaggctggtgtcgatgctgttgagatagcaaatccccagctcaagctgattgcggctgacgccgtcggcaatctgcgcggaggacatggaatagaggctgtaggtcagctccgggtatttttccgtcagcaggcgaataaagatcatcggatccacgctcgccagcggcaccattcccagacggagttcgcccaccacctgacctttgcacagcgcggcttccgcctgtagcccgtcatgtgcagccagcagcgcgcgggcccacgcgaggatgcgttcaccctccggcgtaaacccttcaaagcgctgcccgcgcacaatcagtaccagcccgagctcctcttccaggctgcggatgcgcatggaaagggtcggctgagtgatgttgcactgcgaggccgccttgccaaaatggcgggtctcgtcgagcgcgattaaatattttaactgtttaatatccatctttttctctgcgcgatcggcttacagcatgcggatctcttttgagcgcagggtgatgcgaactggaacggatttatacgacggcgtaccgctgtccttatccagataatcaagcgggaccagcacgttggcctccggataataggccccgacggtccccggcgcgatgttgtacgccaccacggtaatgtcttccagacgctgtccgttgccgggcagggcggtttcgatatccacgcggtcgccgtgctccagccctgactgcgccatatcctcttcgttcataaacagcacgtcgcggcggccaaacacgccgcggtagcggtcatccagcgcgtaaatggtggtgttgtactggtcgtggctgcgcagcgtgatcaggcgcaggacgtgctcaccttcaccgctggcgttctcgtgtacgccgtcgaagaccgagaacatcgcttttcccgtcgccgttggccagagacgttgcgttggcggcagcggcatacggaagccgccgggaacgcggatccgcgcgttgtagttctcaaaccccggaatggtctgctcgatcagatcgcggatacgatcgtaatcctcaaccagcgtcatccagtccacgcgggtatccggcagggtggctttcgccatgcccgcgacgatagcgggttctgaccgaagcaacggcgaggcgggtttgagcttgccggatgaggcatgcaccatcgacatcgagtcttcaacggtaatggactggcggccggtggcctgaacatccagctcggtacggccaagacacgggaaaataaaggtctctttgcccaccagcagatgtgtacggttgagcttggtgccgacgtggacgctcaaatccagggagcccatggccgggaacccgcgttcatggtcgggcattgccaccgcaaaattaccgccgaggcagatgagcgccttcgcgcggccgtcgatcatcgcctgggtggcctgcaccgcgtcatggccgtggtgagacggtggctcaaagccgaaaacctccttcagacggttcaggaaggccggcgtgggtttctcgctaatcccgacggtacggttcccctgcacgtttgagtggccgcgcagcgggcatattcccgcgccgggcttgccgatattcccgcgcatcagcagcaggtccgcaatcaggcggacgttggccgtccctttattatgctgggtaatgcccatcccgtaggtaatgatggtggcattcgatttcgcatacgcctctgccacctttttgagcgccgcctggctgagacctgactcgcgctcaatgtcgtcccagcgggtttgcgcgatatcggcggcaaagtcctcaaagccctgagtatgttcgacaataaacgcgcgatcgagcacgtcaccgcgtgcggcctccatttccagcaggtgtttggcaatccctttcagcgcggcggcatcacctccggccttcacctggaaataggtcgaagcgatatccgtggagccgtaggtcgccatttcaatcacgctttgcgggtccgcaaaacgttccagcgcgcgctcgcgcagcgggttaaagacgataatcggcacgttgcgacgggccagctcatggagggtccccatcattcgcggatggttcgtaccggggttatggccgatggagatcaccagctccgtcttgtcgaaatcgtccagcgagacggtccctttcccgatgccaatcgaacggggcaaaccgacgctggtggcctcgtgacacatatttgagcagtcggggaagttattggtgccgtattcgcgggcgaacagctggaacagatacgccgcttcgttagaggcgcgcccggaggtatagaactcgacctggtccggttcgagcccgcgcagtacttcgccgatgcgttgaaacgcctcgtcccagtcgacgggcctgaaggtatcgctgtcgcggtcatagcgcaggggatgcgtcagccgaccgtaaccttccagttcaaagtccgattttgccagcagcgaggagacgctgttttccgccagaaacgcgggggtgacgcgtttactggtggcttcccaggtcaccgctttggcgccgttctcgcagaactggaacgtcgatttgtgttctttatcaggccacgcgcagcccgggcagtcaaagccgtcaggctggttggtgcgcagcagcgtcgccggggcgtcaaaggtatccatttgggtgcgtaccgcaatggccgttgctttcagtgcgccccagccgccggcagggccgtcatagtgtctgatgcctggcaccgagcgtctttttttgttcatacccactcctgattgattcggtcacacaacgcctgagccaataaatcaccgacgagagcaataggtgaaagcaatgacggccggatggcaacgcacatacggaacgggaaaatgccttaacgcaaactctttttattacagtaatttatctggtctagtgtttaaatatttaaagaaaccgggctgtttgtgaagtgattcacatctgccgtgtcgatggaggcgcattatagggagttcgcgaacgaccgcaaccgaaaagttgcaaaaaaatgactgactgctgcattccccagcaaaaccccgccttatacccatttatgcacaaagttatccacaattctgcacggatcccaatgcgatcccacgaattgagcgggaagatcaactatactggcggcaaatactcttctctgttcaggccgcttcatgaccacacaacgcctcacccgtgactggcgtctccctaccgctgggttgatgctgctggcaattctctttgccggttttaccctgcatgcgcactggaacgcctttatccagtggtgtcttgccacgcaaattaccctgcaccgctatctggtgatgtacctgctgcagttgaataaccaccagtacagcggcggattatggttgttaacgggggctttcctttatggcgtactccacgccattggccccgggcacggaaaattcattgtgacgacctatctgaccaccaataaggaaagcgagctggccgcccgggtcgtccccttcctgggcagcctgatgcagggcgtcagcgccattctgtttgtctttatcctggcggtagggtttaacctcgcctcaggggatatcagtaccagccgctggtatgtggagaaggtcagcgcagtgcttattggcgcattcggcgcatttgtcatttaccaggcgctgaagagcctgcgcccgcgcaggatgtctgtctctgccattaagccgcttcatcagcacgacgaacactgtggctgcggccatcacggcgtaggtacagacctgacgcagggcgactggaaaactcgtctgggcgtaattctggcgatcggcgcacgcccgtgcagcggggcgatcatgatcctgatgttctccaacgcgctgggcattgttacctgggggatggccgcagtcatgaccatgtcgctgggaaccgctctttctattatggggctttcactggctgtacgttacgcccgcgaacgcacggtggcctggttcggagaaagcgcctcgttaaaatggctggtgccgaccgtcaaaatagccggagggatagtcctgatcctgttcgcgacggtgctgttcctgacggtgatccccatcagcgccaatggcgactacatcgccgcaggatgctaataaaagaaaacccgccagcggcgggttttttgttactcattgatgcgtggatgctgatccaccagtcgggaacgttttttctgcagctcttcaatctcggcgtcaatatcctcaatcttctgctctacattatcgtagtgctcacggaggatctctttcgcttcctggatatccgatgccgcaggcgttgcgcctttgagagggcgattcgccgtctccttcatagtaataccggtaatcaaaccaatcaccgcgatcaccatcaggtaataagcaggcatcatcaggttctgcgtgctctccaccagcgaggcggcaagcgtcggggtcagaccggcaatcagcaccgagatgttgaaggccgcggccagcgcgctgtagcgaatatgggtcgggaacatcgcgggcagcgttgaggccatcaccccgataaagcagttaaggatcaccgccagcatcagcagaccggcaaaaatcagccccagtacattactgttgatcagaataaatgccgggatggcgagggcaaacagcgcaacgcttcccagaataatgaacggtcgacgaccaaagcggtcactcaacaggcccataatcggctgcacaaacagcatacccaccatgatggcgataatgatcagcacaccgtgatcttccgagtagtgcaggttatgcgacagatagctcggcatgtaggtcagcagcatgtaataggtcacgttggtggagatcaccagaccgatacagaccagcaggcttcgccagtgcttggtggcaatctctttgaacgataccttcggaccgtcctgcagcccttcgcggtcaccctgctccagcttatcaacgtgctgctggaacgcaggcgtctcttcaagcgcatgacgcaggtagagaccaatgatccccagcggcagtgccaggaagaatgggatacgccagccccagtcgaggaagttctcttcccccactacggttgaaatcaggaccaccacacccgcgcccaggacaaaaccggcaatggagccgaagtccagccagcttcccataaacccgcgcttacggtcaggagaatactcggcaacgaagatcgaggcgccagtatattcaccgcccacggagaagccctgtgccatcttacagatcagcagcagaatcggagcccaaatgccgatggtggcataagaagggataagaccgatacagaatgtactgatcgacataatgacgatggtgatagccaggatcttctgacgaccatatttatcaccgagcataccgaagaacagaccacccagcgggcgaatcaggaagggaacggagaacgtacccagtgccgcaatcatctgcaagctgggatcggccccggggaaaaacactttacctaacgcataggccacaaagccgtagacaccaaaatcgaaccattccatcgcattaccgagcgaggctgcggtaatcgctttacgcagtttggcgtcatcaataatggtgacgtcgcgaagcgtgatgggtttaatctttttccttctcagcatagctatcctcgttgactcggccctgtctgtttcacagtccagtgtgcgttctgtgaaccatgggatccgctccatgcgaatcgccttattcaagcgtagcaggtttacttacattgacgttttacgtcgatacaaccgaacctgttgacgcctgcctgggcagttaatgacctttttaccctaccagcgtttatatttgtgatcaacttcacacatatttaagcttcaggtcaactcagtccagtatttgccaatcagtgcaaataagccctttctcatccccgcctcatgagctctctcacgcacgtcatgagttctttcgcaacaaaaaaacaaaccacgtttactcacattcaatttacataaattttcttcatcatgacgccgccgatagttttacattgaatatgtgacaaagataactaaaacgatgttttattttgattgaatcaatattccaatgatcgcatgataaatccgaatacagcatttcatgtgttttccaatgaagttaatcgagagaaaacatttattttcctggcgggattatcgagaaacgccactcaaacacaaatgccaatcaattgaatttattgactaatttttaacaccgaacgcccgtcctgcggggtcagatgtgaggattgtccatgaagattaaagccacgatagaacgcatacccggcggtatgatgctggttccgctggtgctgggcgccatcctgaatacccttgcccctgataccggggcttattttggtggtttcacaaaaggcatgataacgggcacggttccaattcttgccgtctggtttttttgtatcggtgcatccattaatttgcgggcgaccggtaccgtattacggaaatccggcacgctggtaataaccaaaatagcggtagcctgggcggtggcaatgatatgcgcgatgttcatcccagagaatggaattcaaaccgggttcttcgcggggttatcggtgctggcgattgtctccgcgatggatatgactaacggcggattgtacgccagcctgatgaaccagtacgggacgaaagaagagtccggcgcatttgtcttgatgtctctcgaatcaggcccgctgatgacgatgctgatcctggggtccgctggcctggcctcttttgaaccccaccactttgtcggcgcaatcctgcccttcctgatcggctttgcccttggcaacctcgatcacgatctgcgtgatttcttcagcaaagccacgccggtgctgatcccgttcttcggctttgcgctggggaacaccatcaacctgaaggttatccttgataccggcctgctgggtattgtgctgggtgtcgccgtaatcgtcattaccggtattccgctgatcgttgccgaccgcgtgatcgggggaggaaacggcacggcgggcgtcgccgcctcttcagccgcaggcgctgccgtcgccaacccggtgattattgcccagattaacccggccttcgaaccggtagccgcttcagcgacggcgctggttgccgccagcgtgattgtcactgcgctactggtgccgatcatcacggcgctatatgcgaaacgctacgccaatacccccgagcagaatatcgaacgaaaagcggtcgaactccgccattaacacaccgcaccaacccctcccctcttccctgcggggagagggtgaggggtaagggatttacccaaaaatctcttccaccatcccgtccaccagccgttttgccgaacagagcctcggcatccccagtgcgacggtctgccagttttgcgtcactgaccagctcaccggatgcttatccgcctgacaccagtcccccagccagcccagcatgtctttatgatcgatcgatccgggagaagcaggcgctgtcagccactggtgataaaaatggcgggtcgtgggtgaggcattaatgccctgcgccagatagttagccgccatgctgcgcaggttatccttaagcatggccgccacatcttctttcgcgaggcggcatgcgtcgccaaatgctccccagcgcagttcttccagaacgataaaacagcgcccggccagcgaccagccatcataatgtccggcccgccagcgggtaaaaatttgctcgctgtgctcacccgcctgcaccgttagcccgcgctgggtcagcgccttttctttccaggctgcgcgttgggtaaaatgagacacgagatcggcgtactgctgcgtcagtccgggagactgcagggtgcgtgggtgagtctgctgacgcagcgcaatcagcttctctgccatcagcgtcagcgcgagatggcccggatcaagcatcccggccagcttttccgccagccccaggcgcagcgccgcattttcattgagcatccccgccatcgcccaggggcgtagccgggtatgcgtcatgatttcctgcgtcaaacgctcgcgaaactgcagctgctgtggtcccaggcgaggatgacgcgccgcgtctcccccctgcaccagatcgaccataaattttggattaatacactccagcgttcgcccggggccgtccagtagtggtgttgtcatggttgctctgccgcgaatagagtttgaatatcatcgcgtaacagtcgggtatcttcctgtatccacgtcgcagtagtgatgctttgcttcaacaactggcagagcgctcgggttgagtgctcattttgctgacgcactgcgaggctatcacgcaagctttcctgtaacccggtcaggcacaacgaaaattctgcaaagaacgtcgccattcctgccgtaacagagacatcgacctgcgcggacaaagctttacgtatttgttcacaaaactgatcaatatgttgcttaaatttgtcatgtagctgcgcaatgtcgataacatagcgcgtgcgcgtttccacatactcgtcccagccccagccaggattattgagccagcgagagaccgtttcgcgcatgctgctcccgccggaaggcggggcggcctggctgtcgtcctgcgcaatcgcatcgttaaacagcgctcgcgtattgaagtttagctggcttgcctgaaacgccgggaagctgatccgcgcccgaaaacccgcatggctcagatgctctttaatacgcgtttcgatgggacgcatggcttcgttaagagaacgcgccagcgtggactccagctgatcgaagcgtaacgccagctcacggccgatcttcgtctgggcatcctgcatcacccgctcgcaggaagcgcgtaatttactcagcgcaatctgcgcctgcccttcatcgtccagcaccagctgcttcaccctctcaccgcgaagttgctgccgttcggtgcctgccgaatcaagaatcgggggcgtgctgaacacctggtcaatcgcctggtgaagcgcggttttttgggatcccataaagtccgcggtggcgttcagcgcttcctcaacctcgtgtttcacctcatcgctcaccacgcgctgacgcgtctgcaaaagcgccatgtcctcttccagacgtgcgatattcagctccagcgcctcaaaggccaccgtcagcccctgatagcggaaatcgagatactcgcgggcgttttgcgcgtagttaagaagcttatgcgaggccgaacgcagcgcgtagagcgaggcattggcataggcggcgtaaatcagtttccttatcggttgctcgaagagcgaatcttcccagagcaaatcggcagaatgtcggatatggtcgatatcgtccaggtccgccgtacgccagcgacgtccgagtgcggcttcggcaaaatcctgcacccagggttgctcctgatgatccggcagtcgtccatgcgaacttagctcatagcgcgcgcggttcgccagatacgcccacatggacgacacggggtaaatctggccaggcgaaatattgcctttcattaaggtgccggagatcatcgcccgaatctgttcttcatcatcgctattgcgatctttctgatcgaatttattgaccagcgcatacagcggcaccgattttcccgccgcggaaatcgcctggcggacttcttcatcagaaatggatttaagctgggtataatccattacggccagcaccgccgatgcgcgggacaactgctcgctgagcattttttgcagatgcggctgtccggcctcgttcggcccgggcgtatcgagcagcgtcagttgcccgaggtgggcatccaggcccgcaagatgcacgaactccacttcaattaccgggatatgttcaatagccgtatattcagagaacggaaactccacacccagcgcctgggaaagtctcaccagatcgttgaggcttttcagacaatgaaatatcggctgcgcgcccaggtgatgcttctcaaacgcttcccctttttcaatgcgctccagcagcgtattcatgtctttatcaatttccagacgctgagccagcttcccgcggtcgtaatcacagagctgtttctgaagcagttggatcaattcatcaatcggggaggcatgagagaaatgcagcaccggttccttctgacccggcgtgtggcgaatcaacgtcggaagcgccgtcattggacgattgcggttcggcaacacttcggtacccacaatcgcattaatggtggtcgatttccccgctttcatggtgccaacaatggccaggaccatttccagccgggttattttgcgtaattcattattcagcatcgcctgctgggcgtcgacaccgcgcgcgctaaaatgcaaaggtaaaacgttgtttgtttcgccagtaatagcagcctctgtgctctccagcatctcagtgggcattgatttcaacgtatcaagattttgcagggcaagctgtaacaaacgctcggcttcctggcttaattcaaaaatggtctgtgtgtgcatgataaaagcctttccttaacgcaaatttattacttttattaagccactgcttttaattatgttgttcaggcttatatgatcacgtgtggaaaacatgttcgccgaaatataactgattgaagataatcaggaataattccctatccttgcatggcgtgtagaactcttctccaggcctgatagccaaaaaaaaaaagcgtagcccatttttaagaaacttcaggatatatcaccattatttacccacctaaaaagagaggtaatgcaccactgccataagatatgtatggcagcaaagtccggagataaataacaatgtgtcgcttcaccttatccgaaatggcagagcgtagcaatttgctgcaataaaatattcgatatatttatcgtcatttcttcccaccgtgttaatggacataagcttcgcgtaactgactgacagaacgtgtcactcccgatacgctttttggcttttttaattcacaatatcaccgacaacggtgtggatttgcgctatacttgccgcctttttcggcaccctgccgtcatttagctggcactttccagcgcgtttacacttttgaggataccgatatgtctctcccacactgcccaaaatgcaattctgaatacacctatgaagataatggcatgttcatctgcccggaatgcgctcatgaatggaatgatgccgagccggctcaggatgctgatgcgctcatcgtaaaagatgcgaacggcaacctgctggcggacggtgacagcgttaccgtcgttaaggacctgaaggtgaaaggcagttcttccatgctgaagatcggcaccaaagtgaagaatatccgtctggttgaaggcgatcataatatcgactgcaaaattgacggcttcggtccaatgaaactgaaatctgagttcgtgaaaaagaactgatttttcacctgtacgcccggtaagcgaagcgccaccgggcgcttttgccggatgcgctacgcttatccggcctacaaaaaaagaactaaacttaacgggcttttcttacgtgaggtaaagattatgccgttaagtccctacatctctttcgccggcaactgcgctgaggccaccgccttttaccaacaagccgtcggcgcagaacttctctataaaattaccttcggcgaaatgccaaaaagcgataacagcgaagaaggctgtccgtccggtatgcagtttccggattcggctatcgcccactccaacgtccgcattgcgggcagcgatatcatgatgagcgacgggatgccgcccggcagcaacgcgcagtacgcgggctttacgctggttctcgacacccaggacgtcaatgaaggcaagcgctggttcgacaacctcgccgcgggcgggaacatcgacatggcgtggcaggagaccttctgggcgcacggtttcggtaaagtcaccgacaaatacggcgtgccgtggatgattaacgtcgtcaagcaacaaacgtcgtaggcaggacacgcgcagcgcagccggcaacagcgcccggtggcgctgcgctgaccgggcctacggtgattgtcatcaaactccgctcaactcttcaaactcccgcaacctgcacttaacccaaatgtcacattgatgcgccagcatgaggccacatttatcgtgaggccccgcacatgcaaactgtcatccacgtcgagaaactgagcaagaccttcaatcacaacaaggctctgcatgccgttgatctgaccgtccggcagggcgacatggtggcgcttctcgggccttccggctcgggtaaatccacccttctgcgccatttgagcgggcttatcaccggcgataaaacgccggaaagccacgtcgagctgctgggtaataccgtacagcgcgccgggcgtctggcgagcgatatccgcaagagccgcgcccagacgggctacatcttccagcagttcaacctggtaaaccgcctgacggtgctggagaacgtgctgattggcgcgctcggcagcaccccgttctggcgcacctgtctgcgctggttcaccccttcccagaagcaggaagctttacaggcgctgacccgcgtcggcatggcgcatttcgcccaccagcgcgtctccaccctgtccggtggacaacagcagcgcgtggcgattgcgcgcgcgctgatgcaaaaagcgcaaatcattcttgctgacgaacccatcgcctcgctggacccggagtccgcccgcatcgtgatggagaccctgcgcgacattaaccagaacgacggcattaccgtggtggtcacgctccatcaggtggattacgccctgcgctactgcgaacgcatcgtcgccctgcgtcaggggcacgtgttctttgatggcgcgagccatcagtttgataacgaacgttttgaccatctctaccgcagcattaaccgcgtcgaagagaacgcgcaggctgcttaaataaacccgatccgaggaaagtacatgagctacaaagccgttgccgcgctggcctttaccagcatgttcagcctcagcaccctgttaagcccggcgtatgcggaagagcaggaaaaagcgctgaacttcggcattatttcgacggaatcacagcaaaacctgaaacctcagtgggaaccgttcctgaaagatatggaaaccaagctggggatcaaagtgaacgccttcttcgccccggactacgcgggcatcatccaggggatgcgctttaataaagtggacatcgcctggtacggcaacctctccgccatggaagcggtggaccgcgcgaacggccaggtctttgcccagaccgtcgcggcagatggctccccgggctactggagcgtgctgatcgtcaacaaagacagcccgatcaacaacctcaacgacatgctcgccaaacgcaaagagctgaccttcggcaacggcgatccgaactccacctcgggttacctggtccctggctactacgtcttcgccaaaaacaacgcctccgccagcgacttcaagcgcacggtaaacgccagccatgaaaccaacgctctggccgtggccaacaagcaggtggacgttgccaccaacaacaccgagaacctcgacaagctgaagacctccgcaccggacaagctgaaagagctgaaggttatctggaaatccccgctgatccccggcgacccgatcgtgtggcgtaaaaacctgtccgaaagcaccaaggacaaggtgtacgacttctttatgacctacggcaaaacgccggaagagaaagcggtcctggaacgtctgggctgggcaccgttccgcccgtcaagcgacctgcagctggtgccgattcgccagctggcgctgtttaaagagatgcagggcgtgaaggacaacaaaggcctgaaggacgaggagaagaccagcaaagtggccgcgattcaggcccagcttgaagacctcgaccgcctgaccgccgcgctcggcgcgatgaccagcgtgaataaagcggtgcagtaacgcttttcgcccggtggcgctgcgcttaccgggcctacattttggatcgtaggccggataagcgtagcgccatccggcacacaaagacctgcggagtaacacatgcaaaccatcaccctcccgccgccgaagcgcagctggttctcgctcataagctgggccatcctgctggtggtgctggttatctcctggaagggcgcggaaatggatccgctgctgctcttcaaagacgcgggcaatatggcgaccttcgccgccgacttcttccagccggacttcaaccagtggcaggactacctcagtgaaatggcggtcaccctgcaaatcgccgtctggggcaccgcgctggccgttattctctccattccgtttggcctgatgagcgctgaaaacatcgtgccgtggtggatttaccagcccatgcgccgcctgatggacgcctgtcgtgcgatcaacgaaatggtctttgcgatgctgttcgtggtcgccgtcggcctcggtccgttcgcgggcgtcatggcgctgttcattcacaccaccggcgtgctctccaagctgctttccgaggcggtcgaagccatcgagcccggtccggtggaaggcattcgcgccaccggcgccaataaaatcgaagagatcctttacggcgtcctgccgcaggtgatgccgctcctgatctcctactccctgtaccgctttgagtccaacgtccgctccgccaccgtcgtcggcatggtcggcgcaggcgggattggcgtcaccctgtgggaagcgattcgcggtttccagttccagcaaacctgcgccctgatggtgctcatcatcgtcaccgtcagcctgctggatttcctctctcaacgtttgcgtaagcacttcatctgagaagcgaggctttgttttctatgcacttatccagacatccgaccagtttccccacccgctggcaagagatcgcggcaaagctcgaagtggagctgcgcacgcactaccgctgcggagactacctccctgccgagcagcagcttgctgaccgctatgaggtgaaccgacacaccctgcgccgcgccattgaccagctggtcgagcgcggctgggtccagcgccgtcagggcgtgggcgtgctggtgctgatgcgcccgttcgactacccgcttaacgcccaggcgcgctttagccagaacctgctggatcagggcagccacccgaccagcgaaaagctgctctcggtattacgcccggcctccagccacgtggcggacgcgctgggtattcaggagggcgacaacgtcatccacctgcgcacgctgcgccgggtcaacggcgtcgcggtgtgccagatagaccactacttcgcggacctcgccctctggcccgtgctccagcatttctccagcggctcgctgcatgactttcttcaggatgcgacaggcattgcgctgaaacgcacccagacgcgcatcagcgcccgtcgcgcgcaggcgaaagagagcaaggtgctggagattcccaatatggccccgctgctctgcgtgcgcaccctcaaccaccgtgacggcgagatagacgcgacggaatactccgtcagcctgacccgcgccgacatgatcgaatttaccatggagcactgaatgcacttcgacaccgccacccgacagcgctggatgcgcgtgctggcccacagccagcctgctgcgctctctgcccgcatgaacgcccttgccctggctcccgggtacgacctcctccgcgcgccggagatcggcctcgttcagatccaggcgcgcatgggcggtaccggcgagcgcttcttcgccggggacgccaccctcactcgcgcagcgatccgcctgcacagcggcacgctgggctacggctacgtgctggggcgtgataaagcgcacgccgagcgctgcgcggtcatcgacgcgcttttacaggaaccaccgcatttccagacgctgatggaaacccttatttccccgctggaggccgaccgcgccgcacgtcttgccgcgcgtcagtccgaagtgaataccagccgggtcgacttctttacgctcgttcgcggagacaacgcatgacgcttcaacctgcttttaccctggccgtccaggatgcccaacacagttttcgtcgcctgctgaaggccatgagcgagccgggcgtgattgtctcgctgcaccagctctctcagggctggctgccgctgaacctggcgacaaccagcgtgctgctcaccctggccgacaacgataccccggtatggctttcgggcgcgctgtcgaacgatatcgccaaccagaacctgcgttttcacaccggcgccccgcttgttgaacagccgcagcaggcaatctttgccgtggccgacgaacaaatcagccatgaacagctgaatgccctgagcgaaggcaccgccgtcgccccggaaaccagcgccacgctgattttgcaggtcgccagcctgagcggcggtcgcatgctgcgcctgacgggcgcaggcatcgccgacgagcgcatggtcgcgccgcagctgccggagtgcatcattcacgagcttaccgagcgcccgcacccgttcccgctgggcattgacctgatcctgacctgcggcgagcgcctgctggccatcccgcggaccacccacgtggaggtgtgctgatgtacgttgccgtcaaagggggcgagaaggccatcgccgccgcccatgcgctgcaggcgcacagacgacggggtgatgaacagcttcccgagctgagcgtcgcccagattgaacagcagttaaacctcgccgtcgatcgggtgatgaccgaaggcggtatcgccgaccgcgaactggcggcgcttgccctcaagcaggccagcggcgataacgtggaagcgatctttctgctgcgcgcctaccgcaccacgcttgccaggctggcggtcagcgagccggtgaatacggcggaaatgcgtttagagcgccgcatttcagcggtgtacaaagacattcccggcggtcagctccttggcccgacttacgactacacccatcgtctgctggacttcacgctgctcgcgaacggcgaggcgccacgactcagtacctctgacgccgaacaggaaccgtctccgcacgtcttcagcctgctggcgaaacagggcctggcgaaggcggaagcggacaccggcagcacaccggatgacatcacccgcacgccgccggtttacccgtgctcgcgttcgtcccgcctgcagcagctgatgcgcggcgacgagggctatctgctggcgctggcctactccacccagcgtggctacgggcgcaaccacccgtttgccgccgaaattcgcagcggctatatcgacgtcgaagtcgtgccggaagagctgggttttgcggtgaacgtcggcgaactgctgatgaccgagtgtgaaatggtgaacggttttgtcgcgcccgaaaatgaagacccgcactttacccgcggctacgggctggtgtttggcctcggcgaacgcaaggcgatggccatggcgctggtcgaccgcgccctgcaggcaccggactacggcgagcacgttgctggcccggcgcaggacgaagagtttgtgctggcccacgcggataacgtcgaggccgcgggcttcgtctcgcacctcaagctgccgcactacgtcgatttccaggccgaactggaactgctgaaacgcctgcaacgggagcgcaaacatggctaacttaagcggctacaactttgcctatctggacgagcaaaccaaacgcatgatccggcgcgccatcttaaaagcggtggcgatccctggctatcaggtgccgttcggcggccgagaaatgccgatgccctacggctgggggacgggcggcatccagattaccgccagcgtgatcggcgaggcggacgtgctgaaggtcatcgaccagggcgcggacgacaccaccaacgccgtatcgatccgcaccttctttcagcgggtaacgggcgtcgcgaccaccgaaaaaaccgaagacgcgacgctgatccagacccgccaccgcattccggaaaccccgctcacggaagatcagattttgatttttcaggtgccgatcccggagccgctgcgctttatcgagccgcgcgaaaccgaaacccgcaccatgcacgcgctggaagagtacggcgtgatgcaggtgaagctgtatgaggatatcgcccgcttcggccatatcgccaccacctacgcctacccggtgaaggtcaacggccgctacgtgatggacccgtcgccgatcccaaaattcgataacccgaagatggacatgatgcccgccctgcagctgttcggtgccggacgtgaaaaacgcatctacgccgtaccgccgtacacccgcgtggaaagtctcgattttgacgatcacccgtttacggtgcaggagtgggacgagccgtgcgccatctgcggatccaaacacagcaacctggacgaagtggtgctggacgacacgggcaaacggatgtttgtctgctccgacaccgatttctgccgccaacagagcgaggcgaacggccaatgaaaccgctgctttcggtaaatcacctgacccacctgtatgcgccgggcaaaggcttcagcgacgtgtcgttcgagctgtggccgggcgaagtgctggggatcgtcggcgagtccggctccggcaaaaccactctgctgaaatccatctccgcgcgcctgacgccgcagaacggcgacattttgtatgagggcgcctcgctctacggcatgagcgaggccgagcgccgccgcctgctgcgcaccgagtggggcgtggtgcaccagcacccgatggacggcctgcgccgtcaggtctctgccggaggcaatatcggcgaacgcctgatggccaccggcgcgcgccactacggcaacatccgcgctacggcgcaacactggctggaagaagtggaaatccccgcctcgcgcatcgacgacctgccgacaaccttctccggcggcatgcagcagcgtttacagattgcccgcaatctcgtcacccatccgaagctggtgtttatggatgaacccaccggcgggctggacgtctcggtgcaggcgcgcctgctcgacctgctgcgcggcctggtggtagagctgaacctggcggtggtgattgtcacccacgatttgggcgtcgcgcgcctgctggcagaccgcctgctggtgatgaagcagggtcaggtggtggaaagtgggttaaccgaccgcgtgctcgacgatccccatcatccgtacacccagcttctggtgtcgtccgtgttgcagaactgaggtttctgctgccgggtggcgctgcgcttacccgtcctacgaatagcgcacctgtaggccgggtaaggcgaagccgccacccggcaaaacgaatcgcgaggccaacatgatccacgtacaaaacgtaagtaagacctttgtgctccaccagcaaaacggcgtgcgcctgccggtgctgcaaaatgcctcgctggaggttaatcgcggcgaatgcgtggtgctgcacggccactccggcagcggaaaatcgaccctgctgcgctccctctacgccaactatctgcccgacgaaggccatattcatattcgccacggcgatgaatggatcgacctggtgcaggccccggcgcgtaaggtgcttgaggtgcgccgctcgacgatcggctgggtgagccagtttctgcgggtgatcccgcggatctccgccctggacgtggtgatgcagcccctgctggatcttggcgtgccgcgcgaaacctgtgccgccaaagccgccagcctgctgactcgcctgaacgtgcccgagcgcctgtggcaccttgccccgtcgaccttttccggcggcgagcagcagcgcgtcaatatcgcccgcggctttatcgtcgactacccgattttacttctggatgaacccaccgcctcgctcgacgctaaaaacagcgcggccgtggtggcgctgatcgaacaggccaaagcgcgcggcgcggcgatcgtcgggatcttccacgacgagagcgttcgcacccgcgtcgcggacaggctgcacccaatggggactcccgcatgattattaataacgtcaagctgatactggacaatgaggtggttgacggctcgattgagatccaggacggaacaatccgcgcatttgctgaaacccagagccgctcgcccgaggcgatggacggcgacggcggctggctgctgccggggctgatcgaactgcataccgataatctggacaagttcttcaccccccgcccgaaggtggactggcccgcgcattcagcgatgagcagccacgacgcgctgatggtcgccagcggcatcaccaccgtactggacgcggtggctattggcgacgtgcgcgacggcggcgaccgtctggagaacctggagaagatgatcaatgccgtcgaggagacgcaaaagcgcggcctcaaccgcgccgagcaccgcctgcacctgcgctgcgagctgccgcaccacaccaccctgccgctgtttgaaaagctggtcggccgcgagccggtgtcgctggtctccctgatggaccactcgccggggcagcgtcagttcgccaacattgaaaagtatcgcgaatactatcagggcaaatattctctcagcgacgcggagatggcccgttacgaagaagagcagctggcgcttgcggcacggtggtcgcagcctaaccgtgtccgaattgcggcgatgtgccgggaccgcaatatcgcgctggccagccatgacgatgccacgcacgatcatgtccttgaatcccaccagcttggcagcgtgatcgccgaattccccaccacgttcgaggcggctgaagcctcccgcaagcacggcatgaacgtcctgatgggcgcaccgaacatcgtgcgcggcggctcgcactccggcaacgtcgcggcaagcaagctcgcgtcccttggcctgctggatatactctcgtccgactattaccccgccagcctgctcgacgcggcgttccgggtggccgacgacgagggcaaccgctttacgctgccgcaggcgattcgcctggtgacgaaaaacccggcctcggcgcttaacttgcaagatcgcggcgagatagccgaaggcaagcgggcggatctggtgctggcccaccgcaggggcgaacacgtccatatcgaccacgtctggcgtcagggaaagagggtgttctgatgggaagacttatctggttaatggggccgtccggctccggtaaggacagcctgctgtccgccttacggcagcaggagcatccgcaactgctggtggcgcaccgctacattacccgcgcggccaatgcggggagtgaaaaccatatcgccctgagcgagcaggagttttttacccgtgccgggcaaaatctgctggcgctgagctggcacgccaacggctattactatgggatcggcatcgagaccgatctgtggctgcatgcggggttcgacgtgctggtcaacggttcacgggcgcacctttcgcaagcgcgcgcccgctatggggcggccctgctgccggtttgcctgcaggtttcaccggacgtcctgcgcagccggttgcagagccggggtcgtgaatccgcccgtgagatcgatcagcggcttgcgcgtgcggcgcgctacaccccgtccgactgccatatccttaataacgacggaagtttgctacagtcagtcgagacctttttatcgcttatccgtcagaaggagaaacagcatgcctgactgcacgcttcgccccgccaccgccgacgatgcgcaaatcgtctatgcgttaatctgcgaattaaagcaggccgaatttgatcaccaggcgtttcacgctggctatcttgccaatctgcaggatcacaacatgcgctaccagcttgccgaactggacgggcaggtcatcggcatgatcggcctgcacatgcagtttcacctccaccacgcacgctggatcggcgagatccaggagctggtggtgatgccgcaggcgcgcgggttaaaggtgggcagccagctgctggcctgggcggaaggggtggcacgagaggccggcgcggagctgaccgagctctccaccagcgtgaagcgcaccgacgcccaccgtttttacgtccgtgaaggatatacgcagagccatttccgattcaccaaaccgctgtagaggtgcgttatgagtctgacaatcacgttaacaggaaccggaagcgcgcaactggtgccggtctttggctgcgactgcgcggcgtgccgccgggcgcgcctgcaggagacctatcgccgtcgcccctgtagcgcggtggtcaaattcaacgatgcggtgaccctgctggatgccggtattccacatctgatggacgactgggctgcaggcagctttcagcagtttttgctgacccattaccatatggatcacgttcagggactcttccccctgcgctggggcgtgggcgcgacgatccccgtctacggtccgccggatgaggtgggctgtgacgacctgtttaaacatccggggattctggatttcagccacacggccgacccctttgtcatgtttgagcttcagggtatgcgggttacgcccctgccgctcaaccattcgaaactgaccttcgggtatctgctggaatcggcccacagccgcgtggcctggctgtccgacaccgccgggctgccggaaaaaacggtgacgtttctgcttaacaatcagccgcagacaatgattatcgactgcagccacgaaccgcgcgaagagacgccgcgaaaccattgcgacttaaataccgtgatggcgttaaacgaagtgattggctgcccgcaggtgatcctgacgcacatcagccatcagtttgacgtgtggatgatggataacccgctgccgtccggcattgaagcggggtatgacgggatggtgctggttctcgactgagttttgccgggtggcggctgcgccttacccggcctacgcgccagggttttgcaggcctgcgtcagcgaagcgccaccaggctttagcctcgatcgtaatcgtcttctaacctgcgctcatcctcttccagacggcgtctgtcgtcatccagctggcgctgacgctcgtctaaacggcggcgtctgtcttcaagctgccgacggcgatcgtcatactgacggctatccatgcgacggttatcgtcataacgatcgtcatcatcgttgctgcggctgctgctggggttataggcgtcgttgattgcctgttgaatattgccaatagcatcatcaacgatatcggcatgcgccagttggctggtgagtgacagcagaccaaataacagagcggaagagtaacgtttcataaggccagactcgcaggtaaactggccttaaggtaatgaacagcagggtgtgggggtagcggaggaatctcaaattcagttatgtcctgggacttccatcagttgattcgcacgctgtttattttctgcgaccaggacgatgccgtagcatttttgatccggcgaatggctccagatacgatcttcggggatacaccctccgtcatagataaccttgctaccatcatacggccaaaatgcgccctgctcggtatcaagaacaaatacagcgatttggtcagactcgcgggcaattttctgccagagcatcttcccaccctcatattgttcaaagtcgctgacaagtgtcacgccacactgtaataccagggcttcatacaggcgagttgccagtcccttgtcacgctcggcgggatcaacacagataccttctacctgaatgacattggcatcttcccaacagcgctcgacggcaatgatatcttcacccaaatgcgttttacgttgtaaatccagggcagcaacaacccgatgccggggcaccccatcgaaggtttcgatatccgcttcaataatcgcagctcttggcgtctggctatcaaaaataacatgtagcactcgcccggaaagctcaaactcatcaacgagtttaaacgacctggcaattgtgctcgggctgtatgttgtaggcatcacgatcatttgtgagtccccctttgtgagtaccggcataattccttttatatcccaatctgctaaattttgcgcagattaacatcaccggcgtcaacgttgctcttgatgaaatcctaaacaggggcatttaaaaacatattttccgcagcgcctgcgccagctgcacccgcgtaaacggcttgcgcagtagctgaacgtccggcagctgaggattatgcgtgggccgtaaatcctgtccgctgatcagcaacaccggaagctgcggatagtagctgcgcacatggttaatcacctcggctccgctcaggcttcccggcaacatcaggtcgctgataaacatgccaatatccggcgacgccgccagcatgttcagcgcctgctcgccgttttccgcttcgagcgtcaggtagccaagctggtgcagctgctcgcacagggtctgacggacatcagcttcatcttccagcaccagtaccagccgctcgttatcgaccgaggcggtggcagagagcgtttcatcttcaggaactacaggtagcgtcgatcgcggaaggtgaagccggacggtcgtcccctgccccggcgcgctctcgatctccacgcggccgccggactggcggacaaagccgtacaccatcgacaggcctaacccgctcccgctcccggtctgtttggtggtgaagaacggctcaaagacgcgggatttcacctcctgagacatcccgcagccgcggtcaatgacctccagcgccaccatatcctgcctgcgcccgtcgctgcgggtgacgcgctgattccaggtgcggatttttatcaccccgctttgcccttccattgcatcgcgcgcgttcatcaccaggtttatgatggcgttttccagctggctaacgtctatccaggcgggccatgccggtgattgcgcttcgatctccagggtcagggtggcagggagggagtgacgcagcagttcccggaggttctccagcagcggctgcatctctaccgcatgcggggtcagggattgcttgcgagaaaacgccagcaggcgctgggtcagcaaagcgccacgctcggccgccttcagcgcccgggtaatgcgcggcgcgtcgtttgattcggggtcggtcagctcaaggctgccgatgatcaccgccagcaggttattaaaatcatgcgccagcccgcccgtcagctgtccgacggccttcattttctggctgtgcaggagcgcctcttccagcccctgacgctcaatgcggtcgatctccatctgcgtggttttttctttcagcagacgcgtggtgtgctcaagcgaggcggtgttgcgggcaaaaacgttgaacgcgcgcgccagctcacccagctcatcacgccgctgcagcgcgggaacggacacatcctgttcgccgtgcgcaaggcgtgacatcgcccgggaaatggccgtcagattggaggccagatggcggtagatataccagcaggcacacccggtgatgatcagcgccagcacggcgaaaatggtgataaacacgctgatggattgcagttcgtgatggctctgggcggtgcgaagccgggaggcctgcgccacctgctcaacgtattgattgatatcgctgttgaggatcgccaccagcgccttgatgtggaacatgtaccagcttatcgccagatcgctctcctccagctgcttcgacagcggggcgagctgacctagctcggcattaaaatcgggcaaaactgccttcacgaccggctgtgcggcactccggggcagcatcgcggccaccgcgtccagctgctgaacggttgcgcgcggcgacggggtgtcgatggcggcggcgatcagccggtccatctccatcagctgctgcgcatccggaacattgctgccatagcggcggttgatgtcctgcagatgacgcaggtagctctggctttggtacagcgagctcagcagcgcgttacgctccagatggcgtcgctgtccgcgctccagcatctccgtcacgctctgctgtagctcattgcttcgttgaataatacgcgccaccagggctggctcctgctgcgccagcggcgcctccgcaagctgctccagcgagtggcgcagggccatttgcgtctgcttcaggcgatcggcttcacctttgtactcgagcgccccgaccacctgcgagagccgcaccgccgccgttgccacgctggcggtgtcgcgggccaggttcatgctgccggtcatgtcgtccagcgtttgctgctggacctgctcctggatttggctggcgtggcggaagccgagcaccgccacgccgctcaccatcagcgtcacggcgaccaccagcagattgaaaatcagcaggcggcctcgggcgctggcgaagaacggggggcgtgatggcatggggttgggctcctgtgcggtttggtgccctcaccctggccctctcccacagggagagggaaaaggaaaatgtgacggcgattagctattcataactatgacaaatatgaacagcttctgacattttgcatttacgcacctgtgatgaagtgcagaaatcggcattcacaggagatccgccatgagcagaaccccggtattagagatgcgcagcattgccaaaacgtttggcagtttccacgcgctcaagggtgtggatttgacggtctttgccggtgagatccacgcgctgatgggtgaaaacggcgcaggcaaaagcacgctgatgaaaatccttgcgggcgcctataccgccaccggcggcgagatcctgatcgacggccagccgtttcacattaaagggccgaaggatgcgctggccgcaggcatcacgctgatttaccaggagatgcagctcgcgcccaatttgaccgtagccgaaaatatcttcctcggcagcgagctgtcgcgcggcgggctggtccagcgcaaggagatggccgcccaggcgcaggcggtgattgaccgcctcggcgcgcagtttagcgccaccgatctggtgatgaagctcaccatcgccgaacagcagcaggtggaaattgctcgcgcgctgcaccgcaacagccgcattctggtgatggatgaacccaccgccgccctctcctcgcgggaaacgcatcgcctgtttgaactgattttgcgcctgcgcgatgaagggatggcgatcatctatatcagccaccgcatggcggaggtctatgaactctctgaccgcgtcagcgttctgcgcgacgggcagtacgtcgggagcctgacgcgcgacaagctgaacgcgtcggaactggtgaagatgatggtgggccgcccgctaagcgacctgttcaacaaggagcgtgatattcccctcggcagcccgcgtctcaacgtccaccacctcaccgacggtaaaaaagtacagccgtgcagcctgcaggtgcgttccggcgaaatcgtcgggctggcgggactggtcggggccggacgttccgagctggcacagcttatcttcggcgtgcgtaaagccacgggcggcatgattgaggtcgacggcgagccggtagtgatccactccccgcgcgcggccatcgaaaacggcatcggttttctcaccgagaaccgcaaggagcaggggctgtttctggagctggcggcgcaggagaacatcactatggcgacgctggagcgcgacgccaccttcggctggctgaaccgcaaaaaagcccagtccatttccgatgacgccattgccctgctcaatatccgcgtgccccattcgcaggtgcgcgcaggcggtctttccggcggcaaccagcaaaaactgctcatctcccgctgggtcgccatcggcccgcgcattctgattctggacgaacccacgcgcggcgtggacgtcggcgcaaaaagcgagatctaccgcatcatgaaccagatggcgcgcaaaggcgtggcgatcctgatgatctccagcgagctgccggaagtggtgggcatgagcgaccgggtttacgtgatgcgggaaggcagcatcgcgggcgagcttcacggacgtgacatctctcaggaaaacattatgacgctggcaaccggcgtgaacgacactcatcatcaggcggtgcaatcatgacaactccaacccatccgcagcaggtggcgaaatccgcctccgccaaaaaaatgctgatgagcgatctgatgcaaacggtcggtattttgccgattctgatcctgattgtggcggtttttggctttattgcgcccaacttcttcactgagagcaacctgctcaacatcacccgtcaggcgtcgatcaacatcgtgctggcggcgggaatgacctttattatcctcaccggcgggattgacctctccgtagggtcgattctcggcaccacggcggtggcggcgatggtggtgtcgctcattcccgaattcgccgggctgtccattccggccgcgctgatgctcggcatggtgctgggcctgttcaacggcgcgctggtggccttcgccgggctgccgcccttcatcgtgacgctcggcacctatacggcactgcgcggcgcggcctatctgctggccgacggcacgacggtcattaactctaacatcaacttcgagtggatcggcaataactacctcggcccgatcccctggctggtggcgatcgccctggcggtcattgtggtgtgctggttcatcctgcgccgcaccaccctcggcgttcacatctacgccgtgggcggcaacatgcaggcggcgcgcttaacgggcattaaggtctggctggtgctgctgtttgtctacggcatgagcggcctgctctccggcctcggcggcgtcatgagtgcctcacgcctgtacagtgccaacggcaacctcggcacgggttacgagctggatgcaattgcggcggtgatcctcggcggcaccagcttcgtcggcgggatcggcacgatcaccggcacgctggtcggtgccttgatcatcgccaccctcaacaacggcatgacgctgatgggcgtctcctacttctggcagctggtgatcaaaggggcggtgatcatcattgcggtgctgatcgacaaataccgtacccgacaccatcaaagtgcataacaacaataccctacgagtgaggaagacaagatgcgtttgaaacccttagtgaccgcgctctgtgctggcgcgctgcttgccgcaacgccgtttgcgcaggcgaaagatctgaagtccatcggcgtgacggtgggcgacctggctaacccgttcttcgtgcagatcaccaaaggtgccgagctggaagcgcgcaagctggcgggcgataacgtcaaggtgacgctggtctccagcggttacgacctgggccagcaggtttcgcagatcgacaacttcattgccgcgaaagtggacatgatcatcctcaacgccgcggactccaaagggatcggcccggcggtgaagcgcgcgaaggacgccgggatcgtggtcgtggcggttgacgtggcggcggaaggggctgatgccaccatcacctccgataacacccaggcgggtgagatggcctgtaagtacattaccgaccgcctgaaagggaaaggcaacgtggtgatcatcaacggaccgccggtctctgcggtacaaaaccgcgtggaagggtgccagacggagttcaaaaaacatcctgatatcaaggtgctctcggataaccagaacgccaagggcagtcgtgaaggcggtctggaagtcatgacctccctgctggcggccaatccgaagatcgacggcgtgtttgcgattaacgatccgaccgcgatcggcgccgatctggcggcgaaacaggcgcagcgcaatgagttctttatcgttggcgtggatggatcgccggacggtgaggaagcgctgaagcgtgaaaactcgctgtttgtcgcaaccccggcgcaggatccgcaggtcatggcggcaaaagcggtggagattggctatgacattcttcagggcaaacccgcgccgaaagcgcccgtgctgatcccggtgacgatgatcgataaaaagaacgtcggtacctataagggttggacggttaaatgatccttttccctctcccgcagggagagggaactgttttcaaggagtccccatgaaacgctccgacatcaatgaaatcctcggccacacgcggcagtttttctccatgcacgacgttcatctcccgccttttgccagctttccgccaacgaaatggcagcagcttgaccaggccgcatggcaggaagtgttcgacctcaagctcggctgggacgtgacggcgttcggcggcaacaactttgccgctgagggcctgacgctgtttaccctgcgcaacggctcgcccaacggcgtgccttatgaaaaaagctatgccgaaaaaatcatgcacgtgcgcgacggccaggtgacgccgatgcattttcactggcgcaagcgcgaagacatcatcaaccggggcggcgggaatctgatcattgagttatggaatgccggagcgcatgaagagacggaaaacaccgacgtgaccgtcaccgtcgacggctgccgccagacccacgcccccggcagccagctccgcctcacgccaggggaaagcatctgcctgacgcccactctttaccatagcttctggggcgaacgcggcttcggcgacgtgctggtgggggaagtctcctcggttaatgacgatgaacacgacaaccactttttgcagccggttgcccgctataacaacatcgaagaagacgaaccggcactgctggtgctgtgcaacgagtacaacctgttccggatataaggggtgaatgatgccattgatttctcttgccgacggtcttgcgcacgccagacaacaccgctatgcgctgggcgcgtttaacgtgctcgactcccacttcctgcgcgcgctgttcgccgccgcaaagcaggaacgctcgccgtttatcatcaacatcgcggaagtgcattttaagtacgtgtcgctggattcccttgtcgaagcggtgaagttcgaggccgctcgccacgctattcccgtggtgctcaacctcgaccacggcctgcattatgacgccgtcgtgcgcgccctgcgcttagggttcagctccgtgatgttcgatggctctacgctgagctatgaggaaaatgttcgccagatgcgagaagtggtgaagatgtgccatgcggtgggcgtctccgtggaggcagagctgggcgcggtcgggggggatgaagggggcgcgctttacggacatgcggatgaagccttcttcaccgatccacagctggcgcgcgaatttgttgattcaaccggtatcgacgcgctggccgtcgccatcggcaacgcacacggcaagtataaaggcgagccgaagctcgatttcccgcgtctggacgccattcgtcagcagacggggctgccgctggttttacacggcggctccgggattagcgatgctgacttccgccgcgccatcgagctgggcattcataaaatcaatttctataccggcatgtcgcaggccgcgctcgccgccgtggagcagcgcatggcgaaccgccagccgctgtacgacgagtttgccgagctgctgctggggatagaagaggcgattacggatacggtcgccgaacagatgcgcattttcggcagcgcggggcaggcatgatggaacgcaaaggcatcatcgccgcaggcaatatgctggtggaccacgtccaccagatcgtgcagtggccggagcgcggctggctggcggaaatcacccacagcgaacgctcaaccggcggcgcgccgctcaacgtcctgctgacgctggcgaaaatgcacgttggcctgccgctgcaggcggtggggctgattggcgaagacagcgacggggactatattctggcgatgctcgaccagtaccacgtcaaccgccagcgcgtacagcgcaccacctttgcgccaacctccatgtcgcaggtgatgaccgaccccagcggacagcgcacctttttccactcgccgggggccaaccgcctgctggatcttcctgctttcgatcgcttagacggatcgatgaagatcttccatctcggctatctcctgctgctcgacagcctggatatgcccgatgacgagttcggcacccgcagcgcgcggctgctggcgcagatgcgtgaccaggggtatgaaacctcgctcgatctggtttcccgcaagggcgacccgcgctatcagccgctggtgctccctgcccttcgccatctcgactatctggtgattaacgagctggaggccggtgagtttagcggcctgacaatgcgtgacgaaaacgacgccccgcacattgcccatatcgcggacgccgcggcgcagctgctggcggccggcgtacgccagcgggtggtgatccactgtccggaaggcgcatggggagaagctcgcggtgaagcgggtcgctggatcccgtcatggatgctggagcaggaagagattattggcagcgtcggcgcgggcgatgccttttgcgcgggctttttatacggctgccatgaatcgctgccgctgacagaaagtatttatctggcgcacgcctgcgcgcgggcaagcctgctggccgccaatgcgattgacggcgcaaaaacgctggccgagctgcaggcgtttattcgcgagagcatttaatttaacaataattgcgatttttcattacagttctatgaattttatattcccgaactacactctctccatctggcatattcggcgtgggcagcactctgtccgcacgcttttccgaaatgagatagaaagaggacaagggaaaaatgttcgcagccatcatcatcggtattttcattatcagcgttatttatgcgcattcccgcggcaaagaaaaacagacgctttcccgtcagctcttcgaccattcgacgtttatggcgcccatcaatatgtttatgacggcgttttcttccctgcccgccaggcagcctttctttgaaacagagcgcttcccggaattaaataagctgacggaaaactggctggttattcgcgaagaggcgctgcgtttgcagcatcatattaaggcagcggaaaataataacgacgccggctttaacaccttttttaaacgcggctggaaacgtttttatctgaagtggtatgccgatgcccatccctccgcgcagtctttatgcccggtgacgacccggctggtgagtgaaatcccttcggtgaaggcggccatgtttgccgagctgccggcgggtgcaaagcttggcaagcaccgggatccgtatgcgggctcggttcgttaccatctgggcttattcaccccgaatgacgatcgctgctttattgaagtcgacgggcagcgccacagctggcgggatggtgaagccgttatttttgatgagacctacgtccactgggcagagaataaaacggatcaaacgcgcattattctcttctgcgatatcgagcgtccgatgaaatggcgctgggcgcaggcggttaaccattgggtgggaaccacgctaatgtctgcagccagctcaccgaatgacgagaatgacagtactggcggcattaaccgcatttttaaatacgttcatgcaggtcgcgagcgggggcagcgtctgaaaaaaagaaaccgtaaggcctattacgccctcaagtatctgtgcatcgctgcaatctttgccgccatcattgttccggcgataacgtaagccttatgccgcctgttcgggccggctcacgtcagtggcaaacacgtaacccaacccgcggatggttttgatgagcgcaggctgatgcgggttagcctctattttccggcgcaggcgcatgatcagcacgtcaatcgtgcggtcgaacacgtcggcgctttcgctgtgggtcagctcaagcagccgatcgcggctcagcacccggcgggcattttgcgtgagcgccagcagcaggccgtactcgccctgggttaagggcacggtattacgctgcggatcaatcagctcacagcgggtggtatcaagcgtccatccgttaaacgcaatgcccgcgacgggcgctgcgggggcttctgccgccagcgcgcccgttcggcgcaacaccgctttcacccgggcgaccaccacgcgcgggttgaacggtttgccaatataatcgtcggcccccatctccagccccaccaccacgtctgactcgctgcccaggccggttaacatcacaaccggtagcgccggacgctgcttttgcagctgcagcagaacctgcaggccgttgatatccggcagcatcatatccagcagcacaagcgcgatattcggctcctgctgcacctggcgcagcgcatcctggccgttatggcagacaagcacgctaaagacgtgctcgctcagcacgtcctgaagcagttcgcagactgccgtatcgtcatcaaccaccagaatcgccggtttcatcgtatgcttccgtcaggggattatgttaagtctgaactattctgccgtcggctccagtcaaaaggttttttcagtgacggaaattcaacccatgtcacatccgctgccctgtcgacacgtcaattttgacgattgactgctttttgtcagggttttcaccccggatgggccgtaaagtcaggggatacccatacaaaaaacatggcatagaagctgcatagtgggtgcgaacgattcgattaactggagcagactgatgaaaaaagtcgtcacggtttgcccttattgtgcctcaggttgcaagatccacctggtggtcgataacggcaaaatcgtccgggcggaggccgcgcaggggaaaaccaaccagggcacgctgtgcctgaaagggtactacggctgggattttattaacgatacccaaattcttaccccgcgcctgaaaacccctatgatccgccgcgagcgcggcggcaagctggaagccgtctcctggaacgaggcgctggattatgtcgccacgcgcctgagtgccattaaggccaagtatggcccggatgccatccagaccaccggctcttcccgcgggacgggaaatgaaaccaactatgtgatgcaaaaattcgcgcgcgccgttattggtaccaataacgtcgactgctgcgctcgcgtctgacacggcccatcggttgcaggtctgcaccagtcggtcggcaacggcgcaatgagtaatgccatcaacgagatagagaataccgatctcgtcttcatctttggttataacccggcggattctcaccctatcgtcgcgaaccacgttattcgcgctaaacagaatggggcgaaaatcatcgtctgcgatccgcgcaaaattgaaaccgcgcgcattgcggatatgcacattgcattgaaaaacggctcaaacatcgcgctgttgaacgcaatggggcacgtcattattgaggagaacctgtacgaccaggcgtttgtcgcgacccgtacagaaggctttgaagagtataagaaaatagtcgagggctatacgcctgaatccgtcgaagcgataaccggcgtcagcgcgcaggagattcgtcaggcggccagaatgtatgccggggcaaaaaccgccgccattctctggggtatgggcgtgacccagttctaccagggcgtggaaaccgtgcgctcgctcaccagcctcgcgatgctgaccggtaatctgggtaaagcccacgttggcgtgaacccggtgcgcggtcagaataacgtgcagggcgcctgcgatatgggcgcgctgccggatacttatccgggctaccagtacgtgaagttcccggaaaaccgcgccaagttcgcgaaggcgtggggcgtggaaagcctgccggaacataccgggtatcgcatcagcgagctgccgcaccgcgcggcgcatggcgaagtgcgtgcggcctatatcatgggtgaagatccgcttcagaccgacgccgagctctctgcagtgcgtaaagggtttgaggatctggagctggtgattgtccaggatatcttcatgaccaaaaccgcggcggcggcggatgtcattttaccgtcgacctcctggggcgagcatgaaggcgtctacacggcagccgaccgcggcttccagcgcttcttcaaggcggtcgagccgaagtgggatctgaaaacggactggcagatcatcagtgaaatcgccacccgcatgggctacccgatgcactacaacaacacccaggagatctgggatgagttgcgcagcctgtgtcctgacttctacggcgccacctatgaaaaaatgggcgagctgggatacatccagtggccgtgccgggacgagtcagaggccgatcaggggacgtcctatctctttaaggagaaattcgacaccccgaatgggctggcgcagttcttcacctgcgactgggtcgcgccgatcgataaactcaccgatgagtatccgatggtgctctccaccgtacgcgaagtgggccactactcctgccgctcgatgaccggaaactgcgccgcgctggccgcgctggcggacgagcccggctatgcgcagatcaacaccgccgatgcggaacggctcggtattgaggatgaagcgctggtgtgggtgaactcgcgcaaagggcggatcattactcgtgcgcaggtcagcgatcgtccaaacaaaggggcggtctatatgacctaccagtggtggattggtgcctgcaacgagctggtaacggagaacttaagcccgataaccaaaacgccggagtataaatactgcgccgtaaacgttgagccgattgcggatcagcacgccgcggaacagtatgtgatcgacgaatataacaagctaaaagcccgactgcgcgaaagcgcaatgggttgaagccgttaatttatcgttgaataaagggagtgaaatattcactccctttttatttccgagtaatccatcaataatatcaattaatattctggaaaacggctcgcagaaataatgtaattttcgcgaaaaagaattacatctttgcattttaattcagagggataagatattcggcgggtgcttaagactttctgtcttgagcattgttgagggacagaaagtagaaagccccgggaaattttcatttacccgaggctactccctcaactccaacaagttgagagtagcctcttattctttttttgacaaggagtaaaaggcatgacgccattaaaaactgcgttaggcatcgtctttattgtttgcctgacgatagtaatctttacctttattactcgcggcaggctctgcgagttttcaataaagagtgagcatcaggaggtggcggctaaattagcctgcaacccaggctaacctctacgggcggaacaacggttccgcccggcttgtaggatgctgaggtcttaatgcacccatttttttcttttgcgcccgcgattatactgcgcggcgtgtacccagatgataagaatccatgaaagccatttttctgttgttagtgtttttaacgtccttcgcccgcgccgatgagataggcagccagtatcggaaacaggcggaagccggtgatgcgcgtgcccagtattatcttgccgatacgtacttcagctccggcgacagcaagcaggccgcgctgtgggccgagaaagccgcgaaaggcggcgatgtcgacgccatggggttgctctcgcaaatcctctttacgcagggcgattacacacaggccaaagccctggcacagcaggcaaacattgctggcagcaaacgcggcgcgatcatgctggcgcgcattctggtgaatactcaggcgggaaaaacggactatccccaggccatcagactgctgcacacggcaaccgaagatatcgacagcgactctgcggtcgatgcacagctgctgctggggctgatttatgccaacggcgtcgaagtagcgcaggatgacgtgcaggccgcctcgtggttcaagcggagttcagccctttcgcgcaccggctacgccgagtactgggctgggatgttgttcaggcagggtgagaaaggctttatcacgcccaataaacagaaagcgctgtactggttaaacctgagctgtacggaagggtttgatacgggatgtgaagagtttgatgcgttgagcggggagtaaaccattgcccggtggcgctgcgcttaccgggcctacggcttgtgtaggccgggtaaggcgaagccgccacccggctttttacatcactggtcagccgtcttatcaaaacgacccagcacctcgcgttcatacgccagcgcctttttacggtcgaatttgtgttcccacttggcgataaccagcaccgccagcgcattccccaccacgttcagcgccgtacgcgccatgtcgaggatacggtccacacccgcgataaaggccaggccttccagcggaatgcctacgctgcccagcgtcgccagcagtaccacgaacgaaacgcccggtacgcctgcgatacctttagacgtcaccatcagggtcagcaccaggacgatctcctgccacagcgacaggtcaatgccatacagctgcgcaataaagatagcggcgatactctggtagagcgtggaaccatccaggttaaaggagtaaccggtcggcaccacgaagctggtgatcgacgctggcgcgccgtaggcttccatcttctcaataatacgcggcagcacgctctcagagcttgccgtggagtaggccagaatcagctcatctttcaggatacgaatcaggatccagatgctcagcccacacagacgcgccacaattcccagcaccaccagcgcaaagaacaggatggcaaagtgcaccaggagtaccagcttcgccagcggccagagggaggcaaaaccgaagttcgccacggtgacggcgataagcgcaaacacccctaccggcgcgtaacgcatcaccatgtgggtcactttaaacatggtttcggagatcgagcggaacacggtcaccagcggttcgcggtgcgtcgcgggcagtgaagagagccccagaccaaacaggaccgagaagaagataataggcagcatctcgcccttcgccatcgacgccacgatgttggtcggtaccagagaaaggatcgtgcccatcaggccgtgtgcatggctttgcacgtcagcggtcgtactttggtatttcgaaatatccaccgtcgccagctgcgacatatcaatcccggaacccggctggaaaacgttcgccagggtgataccgagaatgatcgcaaccgtagtgatcacttcgaaatagataatggttttcgcaccaatacggcctaactgcttcgcatcgccgacgcctgcaatacccactaccagcgtcgagatcacaatcggtaccacgatcatcttgatcaggtgaataaagatatcccctgccggtgaaagcaggttcgcaatcagccagtcgcggctgtcgctgtgatagtggaggtaactgcccagcaggatgcccagcacaagggcgattaagatctgccaggccaggctgactttaacgtttttcatagaaactgacttcctcaatgaagcgccttattcacttaaactgcatgaatatggggacatactgaaagggtatgaattgtgttgcgtcgatttatgggattttttaacgcggcgtatgagtatcatttgcgcggcctgttgcgcaagccttaaagaacgacgcatttcactcgtaaaagcgtctgtgacgggagtttctcctgattctaataaataaccttttgttataaaaaaccttttttaaacataaatgtgaataatcgtcagcataaattattttccttcaaagtttcattcgctcatttttcaacctgttcaaacaatgcgtgatctgtcgcccaaataataaacaaagcttgtaaagcccctactattaacgtttttgcgacatattattaacatcttacaaggagaaaaaaagccatgagccaaatacacaaacatgacattcccgcaaacattgcggaccgttgcctgatcaacccggagcagtaccacgagaaatatcagcaatctattaccgccccggacaccttctggggtgagcagggccatatccttgactggatcaaaccttatcagaaggtaaagaacacctcctttgcgcccggtaacgtctccattaaatggtatgaagatggcacgctgaacctggcggcaaactgtctggaccgtcaccttgccgcgcgcgggaacgagacggcgattatctgggaaggcgatgatgcctcgcagagcaaacacattacctataaagaactgcaccgcgacgtgtgccgctttgctaacgtcctgctggataaaggcattaaaaaaggcgacgtggtcgctatctatatgccgatggtgccggaagcggcggtggccatgctggcctgtgcgcgtatcggcgcgattcattccgttattttcggtgggttctcgccagaggcggttgcgggtcgtattgtcgattcaagctcaaaactggtgatcaccgccgatgaaggcgtgcgcgcaggacgcagtatccccctgaagaaaaacgtcgacgaagcgctgaaaaacccgaacgtcaacacggtcagcaacgtcatcgtccttaagcgtaccggcggcaaaatcgactggcacgaggggcgcgacctgtggtggagcgatctgattgaaaaggcgagcgaccagcatcagccggaagagatgaatgcggaagatccgctcttcattctttatacctctggctcaaccggcaaaccgaaaggcgtgctgcacaccaccggcggttatctggtctacgcagccactaccttcaaatacgtcttcgactaccacccgggcgacatctactggtgtaccgccgacgtgggctgggtcaccgggcacagctacctgctgtacggtccgctggcctgtggcgccaccacgctgatgtttgaaggcgtgccgaactggccgaccccggcgcgtatgtgccaggtggtcgacaaacaccaggtcaacattctctacaccgcaccaacggccatccgcgcgttaatggcggaaggcgacaaagccatcgaaggcaccgaccgctcttcattgcgcattctcggttccgtgggtgagcccattaacccggaagcctgggagtggtactggaagaaaatcggcaacgagaaatgcccggtcatggacacctggtggcagaccgaaaccggcggctttatgatcaccccgatgccgggcgccacgcagctgaaagcgggctcggcaacgcgtccgttcttcggcgtacagcctgcgctggtggataacgaaggcaacccactggaaggggccaccgaaggcaacctggtgatcacggactcgtggccgggtcaggcgcgtaccctgttcggcgatcacgatcgcttcgagcagacctacttctcgacctttaaaaacatgtacttcagcggcgacggcgcgcgtcgtgatgaagatggctattactggatcaccggacgcgtggacgacgtgctgaacgtctccggccaccgtctgggcaccgcggagattgaatcggcgctggtgtcgcatccgaagattgccgaagccgccgttgtaggcattccgcacaacatcaagggccaggcaatttacgcttacgtcaccctgaaccacggggaagagccgtcgccagagctctatgctgaggtgcgcaactgggtgcgtaaagagattggcccgctggcgacgccggacgtgctgcactggaccgactcgctgccgaaaacccgctccggcaaaatcatgcgccgtatcttgcgcaaaatcgcggcaggggacaccagcaacctcggtgatacctcaacgctcgcggatcctggcgtggtggaaaaactgctcgaagagaagcaggccatcgcaatgccttcctagtgttttctccctctcccctcaccctctccccataggggagaggggataaaaacaaaccaaccttacctttggagactctgtgatgaatgaccatatttgtcagcagatagagaatagtgcgcactacagggagctcgtcgataagcggcaacggtttgccttcaccctttccatcatcatgctgattatctatgtcggctttattctgctgatcgcctttgcgccgcactggctgggcaccccgctgcacgagggcaccagcgtgacgcgcggtattccgattggcattggcgtcatcgtgatttcatttgtgctgaccggcgtttacgtctggcgcgcgaacggtgaattcgatcgccttaataaagcggtactgcaagaggtaaaagcatcatgaagagaattctgacggcgctcgccgccacgcttccctttgccgcccacgcggcagatgcgattaccggcgaggtacagcgccagccaaccaactggcaggcgattgtgatgttcctgattttcgtggtgctgacgctgtacatcacttactgggcgtcgaaacgcgtgcgctcccgtaacgattactacaccgcaggcggcaacattaccggcttccagaacgggctggcgattgcgggtgactttatgtccgccgcctcgttcctcgggatctccgcgctggtctacacctccggctatgacggcctgatttactccctcggcttcctcgtcggctggccgatcattctgttcctgattgccgagcgcctgcgcaatctgggccgctacaccttcgccgacgtggcctcgtatcgcctgaagcaaggaccgattcgcaccctctccgcctgcggttcgctggtggtggtggcgctgtatctgattgcgcagatggtgggcgcgggtaaattgatccaactgctgttcggcctgaactaccacatcgcggtggtcctggtgggcgtgctgatggtgatgtacgttctgttcggcggcatgctggcgacgacctgggtgcagatcatcaaagccgtgctgctgctattcggcgccagctttatggcctttatggtgatgaagcacgtcgggttcagcttcaataacctgttcactgaagccatggcggtccacccgaaaggggaagccatcatgagcccgggcgggctggtgaaagacccgatatcggccctgtcgctcggtctgggcctgatgtttggtaccgcaggcttaccgcatatcctgatgcgcttcttcaccgtgagcgacgctcgtgaagcgcgcaagagcgtcttctacgcaaccggcttcatgggttacttttatatcctgacctttattatcggctttggcgcgatcatgctggtgggggcaaacccggcgtttaaagatgccgcgggcgcgctgattggcggcaataacatggcggcggtgcatctggccgacgcggtgggcggcaacctgttcctcggctttatctcagccgtggccttcgccaccattcttgcggtggttgcgggtttaacgctggccggggcgtcggcggtttcgcatgacctctacgccaacgtcttccgcaaaggcgcgagcgagcgcgatgagctgaaggtttctaaaatcaccgtgctggtgctgggcgtcgtggcgatcctgctgggcattctgttcgagaagcaaaacatcgcctttatggtggggctggccttctccatcgcggcaagctgtaacttcccgatcatcctgctctccatgtactggtcgaagctgaccacccgtggcgcgatgattggcggctggctggggctgctgacggcggtgatcctgatgattctgggcccgacgatctgggtgcagatcctcggtcacgccagcgccatcttcccgtatgaatatccggcgctgttctcgattgccgtggcgtttatcggtatctgggtcttctcggctaccgacaattcgccggaaggtaacctggagcgcgagaaattccgcgcccagtttattcgttcacaaaccggtcttggcgttgagcagggccgcgcgcactaaacctttctccccggccattctggccggggagcttaaaacatcacccacgccaccagcggcgcaataagcaccatcgtcacgcccgacagcatcatcaccaggctcgcgacaaccccctcctgctggcccagctcataggaacgtgccgtgcccgcgccgtgcgacgccgcgccaaaccccgcgcctttggccatcccttcccggatggaaagccgcagaaagagcatatcgcccaccgccatcccaaagacgcccgtcaccaccacaaacagcgccaccaggtccggctgtccgccgaggggtttcgccgccgcgagcgcaaacggcgtggtcaccgagcgcacggccaggctgcgctgaatttcgtcgggcagcgtaaacagtctcgccagccagacggagctacagaccgcgaccaccgtagcggtgatcacgcctgcgctgagcgacatccagtggcgcctgataatcgccaggttgtcgtaaacgggcacggcaaaggcgatggtcgccgggccgagcagccacagcagccagtgggattcaccaatgtagttctgccaggagatatggccgaagaccagcatcagcaccagcaggatcggcgtgaagaccagcggcatcagcggcagcgcatgaaaccggcgatacagccgcttgttggcaaagtagatcgccagcgtcgcgatcaggcacaagacgctgatctgaaagttagtcatgtttgtgcctgctgatttcaaagcgatacactttatccaccacccaggcggtcgctcccagcaccatcagcgtactcagcgcgatcaccgcgaagatacgccagccatccaccatcaacagctgcgcatagttcaccaccgccaccacggcaggaacaaagaacagcagcatctccgccagcagccagcgcgccccggcgcgcacccagttgagggggatcacgcgacagaggatgagcgtcaacatcagcagcatccccaccaggttggcaggcagcggcaggtgcagccagccgacaagatattcggcgaaaacaaacagtcccgcgtaaagcagtacttgaaccgggacctggagtcgttgcacaacggcaggcgtaacacggcttaacgccacggccatgggggttttcctcaaaaatgagacgaggcaccagtatagtgagcgcacggtatggactgaaatgaattaaaatcatcacaggtatagtttcgaggaataatcatggacataagaacgctgcgctattttgtcgaagtggttcgccagcaaagttttacccgcgcagcggagaagttgtttgttacccagcccgccatcagcaagatgctgaaaaacctcgaagatgaactgaactgtaccctgctgatccgcgacgggcgcaagctgctgctgaccgacaccggacgcgtggtgttcgaacgcgggctggcgattctggcggagttccgccagctggaagcagagctggacgatattaatcatctgaccaaaggggtgcttcgcctcggcattccaccgatggtggggatgatgatggccggaccgattagcctgtttcgccagcgctatcctggcgtagagctgaaaatttcggagtttggtggcttaaccgtccagcaggcggtcactaacggcgagctcgacgtggccatgaccgccctccccgttgaggaagagagcggcctggcgacgcttccgctctttagccacccgctgtgcgtgctggttccccgctccggcgactggctgaaaagggacgcggtgaagcctgagctgctcggcgaacaccctctgctgatctacaacgaagacttcgccttaagccgccagctgatgacgctgtttaaccaacataacgtcaagccacgcatcgcggtgcgcagcggtcagtgggatttcctggccgcgatggtgcaggcgggtgtggggattgccattctgccgcagccgatttgcgagcgtctggacaaaaacacgctgcgctggatcccgctggagagcgatctgcactggcagttagggatgatctggcgtgaaggggtctatttgtcgcagagcgcgcaggcgtggctgcagtgttgtgaggggttttgggtgcggtctgaatagtgccgggtggcggcttcgccttacccggcctacggttcaaacgtaggcccggtaagcgcagcgccaccgggcaaaagcgcgctactgattctctatcaacagcgcttccagcaggtccagatcgtgcagcagcttttgcagcgtctcgttgctgatctggcgcgtggcgcgcaggtgatacagttcggcacgctctgagcgcagcgcggccagacggaaccggcgttccaggttctcctcctgcagcgagctttctacatcgttacgcccgtccgcgcggcgacgcaggttaccaattacgcgggaactcacctccgtcagcagctgattgtcgatgttctcttccgcatccgcggccaggcgctcttccattttctggatggcgacaatcgccacttcggcggtagccgcacgcgcaatacgctcttccttgtgctgctgggtcgaatcgccaatatcaatatgctggagcaaaatcggcagcataatcacgccgacgaacagggagaacagaatcacccccgccgccaggaacaccagttcgtaacgcgccgggaagacatcgcccgtcggcagcagcagcggaatggagagcacaccggcgagggttatcgccccgcgtacgcccgcaaaagaggcaatcagcagctcacgcgttgtccacgagccgaactccatcggttttttcttcaggaagcggacgctgaagtttttcatcgtccacagccagccgaaacgcaccagcatcagcgccaggtagatcagcacgatgtcggtaaacagcatccagacctcaacgttcggatcggcctccgccgccaccagcgaggattccataatgcccggcagctgcaggcccaacagcaggaacaccatgccgttaaagacaaactccagcatcgcccaggtgctgttggcacgcaggcgcatcgccagcggcgcgcggcgcatcacgccggagcgggtgatggtcatccctgccgcgaccgcggccagaatgcccgacacgccgatatgttcggcaatcagataagaggcgaacggcagcaggaacagcagtacgatctgcgtcgcgggttcatcgccgccccagcggctgaggaagcgcaatgagcggccgtacagccagctcaccacgaagcccgccaggataccgccgatggctaccttaaagaactccagcgtcgcgccgccgacggtaaagaccatcgtgcccatcgcaacggccacggcaaacttcagggcgaccaggccggaggcgtcattcatcagcgcctcaccctgtaaaatccccatgattttcttcggaatgcggccttcgcccacaatgccggacagcgccacggcatcggttggcgacagcacggcggccagcgcaaaggcaggaattaacgggatacccggtaccgtccagtagatcaggaaaccaatcccgacgacggtaaccaccaccagcgcaagcgccaggccgaagatctctcgcccgtgctcaaggaactcgcgcgtgggcgttttccagccatcggcaaacagcagtggcgggatgaacagcacgaggaacagttcggggtcaaattccacgtgcaggccaaacgtcggccacgccagcagcgcgccgatggcaatttgcattaatggcagggggacctgaaagggcagtacgcgtgtaaccaccccggatagcgagaccacaagggtcatgatgagtattgtgaagaagatttccatgcgttccctgtttgctgtgttgcttatgtactccggaaggcgtcgtgccttttattctatcttccccagagtaacgcaaaaggcaacaggatgagtcctgaaaataaaaacgggcggcctgagccacccgttttcgcatcaaaggacaactcagattgcccagccgcccgcgtaaaacgccaccagcgcaacggcaatcacaacggtgccaacgttcagcttgcgccattcaccggagaccagacgaccaatcaccagcgacgcgaagccgatcataatgccggtcacgatgttacaggtcagtacgatgaagaccgcggtaatcaggccagacatcgcgtccacgaaatccgcaaagtcgattttcgccacgttgctcagcatcagcaggccaacgtacatcagcgctggcgcggtcgcgtacgccggaaccagataggagagcggagagaggaacaggatcagcatgaacagcacgcccacggtgatcgccgtcaggccggttttaccgcccgccgccgtacccgctgcggactcgatgtacaccgccgcaggcgctgcgcccaccaggcccgagaagacgctgctcagggagtccgtagtcagcgctttgccgccgtcaataatctgaccgtctttatccagcaggttcgcctgaccggccaccgcacgaatggtaccggtcgcgtcaaacacggcggtcatcaccagcgccagcacgcttggcaggatcaccgggttcagcgcgccaacgatatccaggctgccaatcagagagttgcctttgtcatcgctcagcgacggcatggcgaaaatgccggagaaatggacgttcggatcgaaaatcaggcccacaatggacacgccgataatagtcagcagaatgccgcccgggactttcagtttttccagaccgataatcaccgccaggccgatcagcgacatgatcaccgggaagctggcgaagtggcccagcgcaaccggcaggccgtccagcgggttcttgataaccagaccgacgccattggcggcgatcagcagcaggaacaggccgatgccgatgccggtaccgtgcgccacgccctgcggcaggttgcgcaagatccagctacggatgccggtcgctgaaataacggtaaacagcacacccatcaggaacacggcgccaagcgcaaccggtacgctgatgtgctggcccagcaccaggctgaacgcggtaaacgcggtcagggagatggcgcaaccaatcgccagcggcaggttcgcccacaggcccatcacgatagagcccacgccggccacaaggcaggtcgccacaaagacagccgctggcgggaagcccgctttgcccagcatacccggcacaacgatgacggaataaaccatcgccagaaacgttgtcaaaccggcaacgatttcctggcgcacggtgctgccgcgggccgaaattttaaacatggcgtcaagtgaaccgccagtacgcgcagatggcgtagacatagaaaacatcccctgagagttttttaggaagtccgtaagcgaggtggagacgccactgccagctaaacgtcaaatccttgtgttgcgtttgcgacgaaagggcgtcacagaaaaagcaaacgtttagctccgcgcttacaaacgggtggtcaaattaaggcaaacgattatctagcctaatccccgtccttttcaactgaactttatcgtttttcgctaaaattcccttatgacgctgaagaaataaacagaggatgcgcaaacgttatcgtccatgcgcaatttgtttacatttcaatcctcacccggaatggataacggtcccccttgtgccagggttcgttgccagccggggctgttttcaactttcgttttccatgcctgactatgcggcaggttgtcgataccgccgcgcgccagcagggcaaagatcgggaagctcatttgaatgtcggccatgctgagcgaatccccggcaaaccagctgtttttagcaaggtgcgactcaataaagcgcgcatgggtttccagctggcggttaaggtacgctttctgcaccccctgcccaagcgctttgcccagggttcggataccaaacggcaccggcggcttgccgagactgctgaagaccagcttcattagcagcagcggcatcagcgatccttccgcgtagtgcagccagaagcgatactgcaccttatgcgccggatctaaaggcttaagccgcgactcggcatcgtatgtttcctgcagatactccagaatggcgccagactccgcgaggatcagcccgttatcttcaatgaccggcgatttgcccaacggatgcacctttttgagagcctccggcgcaagcatgttcttttcgcgctgatagtgaacgatctcataaggcagaccgagttcttccagcgcccagatcacgcggtgcgagcgcgactggttaaggtggtgtaccgtgagcatggttttctcctgttattcatactttttaactatagaaaatcgaacaacaccgcgaaaaaaattcggctaaaaaccggtcagcgacgctggcgaaaaaacgggtcttgcatagaattaaagtgtcagcataatccggaacctccccaaccagctcgacacgaggggtgctgatgtcgggggaaaccctcccgtgaaccagcgggatagagagaaagacaaagaccgggaaaaactaaagcgccctttgtggcgctttagttctttatgtatgtggggttttgccgggtggcggctgcgccttacccggcctacatttgacggtttggtaggccgggtaagcgaagcgccacccggcgaatgggctacacgcacgctcaatcctcttccagcagccgcgctcccgtcccctgttcgcccagtttgtcgccggggttacgcagcgggcagtcgctgcgcgacaggcagccgcagccaatacaaccgtccagctcatcacgcagcgcgaccagcgtatggatacgcctgtccagctcttctcgccactgggatgaaagctctttccactctttcgggctcagcgtatgcccttccggcagcacgccaaatgcctcgccaatggtagcaaggggaatgccgattcgttgcgcaattttgataatcgccacgtagcggagcacgtcgcgggtatagcgacgctggttgccgccgttgcggatgcttttaattaaccctttgctttcatagaagtggagcgccgataccgcaacgccgcttcgctttgccacttcgccgggggttaacagcgctttaatgcgcggcaatctcttttccataaaacctctttacctcaagttaacttgaggaattatactcccccgcagagaaaacgacgaatcaaccgagaaagttgtatctacagaggggcaaccttatgtcgcatcagcagattattcagacgcttattgaatggattgacgatcatatcgaccaaccgttgaacattgatgtggtcgcgaaaaagtcgggctattcgaaatggtatttacagagaatgttccgcacggtcatgcatcagacgctgggtgagtacattcgtcagcgcaggctgctgctggcggcgcaggcgctacgctcaacgcagcggccgatttttgatatcgcgatggatcttggctatgtgtcgcaacaaaccttttcccgcgtgtttcgccgcgagtttgaccgcacgccgagcgactatcgccaccagttgaattaattactctcagtgcaaaggttgctgctgccaggtcataaattcctggggcggcatcgctttcgcgaagtgccatccctgacaaaactggacgccgcgcttcaacagccagctcacctgctctgccgtctcgaccccttccgcaatggttttcagccgcaggctttgcgccatctcgataatatgctcggcgatcaggtggctggtgctgttggtcgttaaggtatcgataaacgatttatcgattttcagaatatcgacgttcagcgagtagaggttgtgcaggttcgaatagccggtaccgaaatcatcgatcgccacttcataccccgcctgacggaaagcctgaatcaccggcgtggttttaggcacatcgataaaaccgcgttccgtcacttcaattttgatttgctgcgcgcggacggcgtagtggcgagccttctcagaaatcatggcgatcagccgcgaggagtggaaatccgtggccgacaggttaatcgaaatatagagatgcggatgcccggccaggaaatggcccaaatcgctgaacacttcctcaacgacgtaatccgtaatccgctcgctcatcccctcattttcagccagcggaataaactcagccgggctcatcacctgcccgttaaaacccggccagcgtaacaacgcctccgcgccgacacaccggttgttcttaatatcaataatcggttgatagtgcacgcaaagctggcgtttgttcagcgcccggtgcagtaaacgccccggcgaattaagctcacgatgagtacgggaccagaccagcaaaataataatgctgcagatcatgcccagcggcagcgttaatgtcgcctgatgataaagcgtttcataaaagcgtttattcgatgtcgacacaatggccgcaatcggtcttttaggggatgtgacgatcgtataaaagcggttatctttttgaaataccgattccttatcccgaatcagcgaatttaataacgaaacgttggctttctgactgacggaaaagaaagcattggttaccgtgtcgtaaaccccccacgagagagaatgatccgcggacatgacttcgctgtatgaaagtggattaacgaccactacataatttccgcgctgcatatatgtcattttatagccagtataaaatggggtgtcgcgataataatagatagcgacgtcaggttttcgcgtgtaattagcgacgggtatggcgtagggttgatccggtgtaaaaacggtcgaacaaagaaaattctgaccttcagcgtaaattaaatcggcaacaaacaggcgaccacgaacaacgttcaacatatattgacggtgtcccggggtacagagctcgccccgatatttttctgcctcgtcccgggccagatcaacctgttgtataaccagctcagttttgtctaaagccagttcagcaaatgtccgtagctgggcgcttgtttcagacacggctcttagctgggcaaaccatagcgcaagcatcaccggcagcataactaccatgatgatccctaccaccctgagcatcttgcgccgcgcgctacgattcatttcccgccctatatccctgcatgttgtacgcctgtagtaatgaaggccggatgctgtgttaaacaggtgattacgttgcatgaatcatgcgaagttagcaactgacttttcgtattaaaaatcttaaatttcgttatgacgataatattttcccgtaagtgaaactgtaagtattcgttccgtttcaattaaggaaaataattatccagccctcgagggcggagggaagataacacaacagacgatcgttgattaagccaaacttctggcagcatgaaaaaagcgcacctttatcatgacgttttatgctatttactgtggggcattgtgtgcgttgatttataaataatcagtcttcgccgcactattttatgattcgactgagcccctcttataaaaaccgaatttgaggtatcaccactagcccgatggacgtttccggcacgctggggggcgcctcctcgcgcgccgaaggcagggccagcctgcacacactctttacctgaggaataaaaaccgttttttgatcgcacagacactggcgaataaatcaacaaatgtgatatagttcacacatattctgtaacgagaaacaccgtttcattcaggtcgtctgttttgtagaggatgggtttatggcaaccattactaccagcatggttctcctgcgctggcctttgttgagtgcggtactgatgtttttggccagcacgctgaacattcagtttcgtaaatctgactacgcgggtctcgctgtcatcagcacgctgttggggctgggtgcagcatgttggtttgcaacggggctgcttggcattaccctgctggatatcgccgccgtctgggaaaatatcaaagtggtgatggttgaagcgatgagccacacgccaccagactggccaatggtgattacctgatccctttatggaataaaaaaacccagacgatgtctgggttttttgtttgaaggacgcacaaatcagaacggaatgtcgtcgtcgaaatccattggcggttcgttagacggcgccggagcagactgctgctgcggacgagactgcgcgccgccgctgaactggttgccgccctgtggctgctgaggctgaccccaaccgccctgctgctggccgccacctgctggtgcgccaccgccctgacggccacccagcatctgcatggtgccgccgacgttaaccacgacttcagtggtgtacttctcagcaccggactgatcggtccatttgcgggtacgcagctggccttcgatatagacctgagaacctttacgcagatactcaccggccacttctgccagtttgccaaacagcacaacgcggtgccattcggtctgctctttcatctcaccggtcgctttatcacgccaggattcggaagtagccagcgtaatgttggcaactgcgccaccactcggcatgtagcgtacttccgggtcctggcccagattaccgacgagaatcaccttgtttacgcctctgctggccatgttcgtgtctcctgaatacgtttcttaatagtgtaaacgcgcgagtgtaccatttccacgctgcattttgatagctgcgagatggattccagagttctcgtgcgaacataacattgttacacagtccgtcagaaaatgcattccaatactgtatattcaaacaggtcaaattgtgtcataattagccgtttctgacagccgtttgtccttcaaacaaaccaggcaatccgtgttccaaccgggaaaggtgaatggataagatcgaagttcggggcgcccgcacccacaatctcaagaatatcaacctcataatccctcgcgacaaactcattgtcgtgaccgggctttcggggtctggcaaatcctcactggctttcgacactctgtatgccgaaggacagcgtcgttacgttgaatcgctctcggcgtacgcgcgtcagttcctgtcgctgatggaaaaaccggatgtcgaccacattgaagggttgtctcctgctatctctattgagcagaagtccacgtcgcataacccgcgctccacggtcggtaccattactgaaatccatgactacctgcgtctgctgtatgcccgcgtgggtgagccgcgctgcccggaccacgacgtcccgctggcggcacagaccgtgagccagatggtggataacgtgctgtcgcagccggaaggcaaacgcctgatgctgctggcgccaatcattaaagagcgtaagggcgaacacaccaaaacgctggagaacctggcaagccagggctatatccgcgcccgtattgacggcgaagtgtgtgacctgtccgacccgcccaagctagaactgcagaagaagcacaccatcgaggtggtgattgaccgctttaaggtgcgtgacgatctcgccacgcgtctcgcagaatcgtttgaaacggcgctggagctctccggcggcacggccgtggtttccgacatggacgacccgcaggcggaagagctgctcttctccgccaactttgcctgcccgatttgcggctacagcatgcgcgagctggaaccgcgcctgttctcgtttaacaacccggcgggcgcctgcccgacgtgtgacggtctgggcgtccagcagtatttcgacccggaccgcgtgatccagaatccggagctgtcgctggcgggtggcgccattcgcggctgggacaagcgtaacttctattacttccagatgctgaagtcgctggcggagcactacaagttcgacgtggaagcgccgtgggccagcctgagcccgaacgtacacaaagtgatcctgttcggttctggcaaagagaacatcgagttcaagtatatgaacgatcgcggcgatacctccgtgcgtcgccacccgttcgaaggggtgctgcacaatatggagcgccgctacaaagagaccgaatccagcgcggtgcgcgaggagctggcgaagttcatcagcaaccgctcctgcgccacctgcgagggcacgcgcctgcgtcgcgaagcgcgccacgtgtttgtggaaaatacggcgctgccgaccatctcagacatgagcatcggccacgcgatggacttcttcaataacctgaagctgtccggccagcgcgcgaaaatcgctgaaaaagtcttgaaagagattggcgatcgcctgaagttcctggtgaacgtcggcctgaactacctgacgctttcacgctcggcagaaacgctctccggcggtgaagcccagcgtattcgtctggcgagccagattggtgcgggcctggtgggcgtgatgtacgtgctcgatgagccgtccatcggcctgcaccagcgcgataacgaacgcctgctcggcaccctggttcacctgcgtaaccttggtaacacggtgatcgtggtggagcacgacgaagacgcgatccgcgccgcagaccacgtgatcgacatcggcccgggcgctggcgtgcacggcggccaggtggtggcggaaggcacgctgaaggacattatggcggtgcccgagtcgctgaccggccagtacatgagcggcaagcgcaagattgaagtaccaaaacagcgcgtggcggcgaacccggaaaaagtgctgaagctgaccggcgcgcgcggcaacaacctgaaagacgttaccctgacgctgccggtgggcctgtttacctgtatcaccggcgtgtccggttccggtaaatcgacgctgatcaacgatacgctgttcccgattgcgcagacggcgctgaacggcgcgacgctggccgaacctgcaccgtaccgcgacattcaggggctggagcatttcgataaggttatcgatatcgaccagagcccgattggccgtacgccacgctctaacccggcaacctataccggtgttttcacgcccgtacgtgaactgtttgccggtgtgccggaagcgcgttcacgcggctacacgccgggacgtttcagctttaacgtgcgcggcggccgctgtgaagcgtgccagggcgacggcgtaatcaaggttgagatgcacttcctgccggatatctacgtgccgtgcgaccagtgcaaaggcaagcgctataaccgcgaaacgctggagattaagtacaagggcaagaccatccacgaagtactggatatgaccatcgaagaggcgcgtgagttctttgacgccgttcccgcgctggcgcgtaagctgcagacgctgatggacgtcggcctgacctatattcgtctggggcagtccgccacgacgctgtccggcggtgaagcgcagcgcgtgaagctggcgcgcgagctgtcaaaacgcggtaccggccagacgctgtatatcctggatgagccgaccaccggtctgcactttgccgacatccagcagctgctggacgtgctgcatcagctgcgcgatcagggcaacaccatcgtggtcatcgaacataacctggacgtgattaaaaccgcggactggattgtcgatcttggcccggaaggcggcagcggcggcggtgaaatcctcgtctccggtacgccagagaccgttgcagagtgcgaagcctcgcacaccgcgcgcttccttaaaccgttgctgtaattgtcacacggagagttgctgtcgggtcgtttccggcagcagctcaaccgcctgctgataggacgcgtccaccaggtagtaaatttgcgagcctggaatcgatccatccagatagacggtgctccagtgcgccttattgaggtgctggctcggcctcacgtcatcatgctgctgacgcagtaaatccgccagttcagggctggttttcagcgacgccgccggacggccctccacctctttcaccatcgcaaacagcacatcccccaccttaacctgcgtggctttccagtcgctatggacgctctgctccgcgccgggcttgctcatgcagtactgaagtatctccgaaattgtcatctttattccccttgtagcgtggcgataattttacgcgaaccaccgtgaatgcgatgctctcccagccagatcccctgccacgtgcccaacagcagccgtccgttgtggaccggcagcatcagcgatacgcccagcagggaagatttgatatgcgaaggcatatcgtccgccccctcatagtcatgctcgtagggcgcgttgtccgggacgctcttcagaaaatgacgctccatgtcagaccggacggtgggatcgcaattttcattcagcgtgagagaggctgacgtgtgctgaagcagcagatgcagcaaacccgttttgacccgcgacaggtcgcggagctgcccgatgacttcatccgtcaccaggtgaaaaccgcgtggtttagcgcttaaggtcagggtctgttggtaccacatctgctgctccgtaatgaaagatgaatctttctaagtgtgcagcaagaaggcgaaaggtaaaacccgcagcagcgagatttgattaaaaaagagtcaaactcgctgccagaggcttaatactccgagttgacgatcacctcttcaccaaactttccggccatcggcagcggtcgataggtcgagttagacgcgcgtaacaccctgatccctctggcaccagcatcctgcgcggcggtaatgtcgttatccgaatcgccataaaacactttgatgtttttcttttccagccactggattttggtgttttgcccctctttgtcacccgcaaaaatgaccggattcatattggcagccgggatctggaaatcgtcctgcagtgttctggagacggtttccgttttggtctggctacggccggtaacgaagtaaatgctgtcaccgcgcttaacgtgcatagcaataagcgcccgggcgacctctttcgggatgctgtactcgtcccagccgttattcattttttcccagaactccggattcttcagatacgcttcgctgtccggtgaatacatttttttgccgcgccagaagccagggcttgagaacagcacggtatcgtcaatgtcgaagcccacggccattggcgcgcgtcccatcaggctgttttcgatttgcgccacggagacccagtgaatgggcgcctgctcggcaagcatggcggcggtggtgccggtgtaaagcggcgtcggcgccgaggcacgtgcgacgacggcgctattaagtgagaacaataagcaggcggcgctgagcgccagtgagatcttgcgcatattttcccctgaatattcagcttgttatcgttttattttgagtgaatggtcaaaaaactatccgaccttaaccccagcgggaggtgaagggaaggagtttttgcttatgaagcggaataaaaagaagacgatcacaaagtgtggatgagtgatgtaggcccggtaaggcgcaggcgcagccgccaccgggcaagattttctgcggcctgatgccctctcccacagggagagggcgataataagtagtgagtacttacatcacagctgcaaacgcctgcgccacgcggtgaacgttgctggcattcaggcccgccacgcacatacggccgctggcgatcaggtagacaccgaactcttcgcgcaggcgatcgacctgcgccgcgctcagtccggtatagctgaacatcccgcgctgcttgagcagatagtcgaagttatgccctggcacagcctctttcaggacgttaaccagctcctgacgcatcgacaggatgcgcttacgcatcgcttccacttcggcaagccaggacgctttcagcgtttcgtcaccgagaaccgtcgccactacctgagcaccaaagtttggcgggctggagtagatacggcgcaccgtcgctttcagctggcccagcacgcggcccgccgcttcggcgtcttcacacaccacggacaggccaccaacgcgttcaccgtacagggagaagatcttagagaaggagttactcaccagtacaggcagcccggcgctggcagcggcacggatggcataggcgtcttcttccatacccgcgccaaagccctggtaggcaatgtcgaggaacgggatcaggtcgcgggtcttcagcacctcgatcaccgcatcccactgggcattggtgagatccgccccggttgggttatggcagcatgggtgcagcagcacaatactgcgcgctggcagcgtgttcagcttttccagcagcgcgtcaacgcgcacgccgttcgtttcgctgtcgaaccacggataggtcgccaccttaaagcccgcgccctcgaagatcgcaacgtggttttcccacgtcgggtcgctgacccacacgcctgaatccgggaaatattttttcaggaagtctgcaccgactttcagcgcacccgagccgcccagcgtctggatagtcgccacgcgtttttgcgcgagcacagcgtgatcggcgccgaacagcagcggtgcaatggtgttgcgataagcgtttagcccttccatcggcagatacagagacgcgccgtgtggaactgcgttcagacgcgcttcggctccggcaacggcttttaattgaggaataatgccatcctcgttgtaatacagaccgatgctgaggttcactttgtcgctgcgaggatcttctttgaaacgctccattaaggagaggatagggtcgccggcataggcgtcaactttctgaaacacgcgatggttctccggaattcgatgaggcagggatttcaacaataaaccggaagcagatgaaggtcgagagcgatatcagatcggtccctggatatatcggcaaatgtgatcgattcgctcaggcagtgagccctgcacgcgcagaaaaggaatatttcgtgccgacagctctgcttcataccatacttgctgtcggtggcgaaacgcctcgccctgccgggtgccatcctgcacaaacggaaattcatctccgcaaagtacgaccagcgcatagtctcgttcagctaactcctttaacgcctgcggcgcgctgccaaactgatcgagtgcgtaaaacagggtcgttaaaggtgaggtatcacagaccagataaggcgccgtgcaggctaatgcttcccgacgtacttgctcgcgggcaatatgcagcaaatcctcccgatccaggataccgttcttcgcttcccagtgttcacggccatactctgcaacgtacggaacgtttagcgtctgcgccagagcctttgctagcgtgcttttgcccgtcgattctccacctaataagcagatacgaaaaacaaagctgcggtacacctctggggacatcatcttacgataacgatgaacatcagaacggatgagcgttcccgaaggggcctctggtccccgttgacgctggagacgcacgtgcgcaaccggtcgtccgaaacgctcgctcaggacagcggcaaacccgtctccatagtcttcggcagtaaataccgcctctggctgacaatgcaaaatgtcctcacacagcgttgcaacataatgccggtgaagatcgtcatcagcgtcattcggtggcggtggcgcaaggccatatgcagccaacacatgcggcgaaagcacgaggtggcgacattgcgggaagcgcgttgttaaccagttaagccgcttttcaggttcgtaaccgcgtatttccggcgacgaatagctgatgatacagaccgtctcgcactgctcaagtgccgtattgataagcgcttcatggcctgcatgtaatggtgcgaatttgcctaccaccaggccgttggcatacagcgtcattgcgcacggatctccttgcgccactgatacagtccgtgccacgcattaaaccaaaacaccagatataaaccggcggtcagatacagttctctcgtcgcgtacagcggtactgccagcgtgttaacggcaagccagatataccagttttccagacgccgtcccatcaacataaactgagcaagaatgctgaatgtcaaaatgatggagtccagccagggggcccatgcattggtatagagatgcaatatccacccatacgccgctgctacgcttacggcgcaggctaaaagcataaaaaaatgtcccggtctggtacgacgaacaggcaagacctctccatgattgcctttaagccaatgcagccagccggttatgctcgttatgatgaaaaagaactgaagggtaacgtcagcataaagctgcacagaatagaaaacccaggcataaagcccgctaccgatgatgcctatccaccacgtatggatattgtttctggcggccagccagacggagagagcataggccagacatgcagcgatttctgaaggggacattatccttccctggaatgaaatgttagtcgatgtacttcatcgccacccgcgacgtcaggcgggtgataagttcgtaagcactcactttagtgatttcagcaatacgttcaacgggtaaacctttcccccacatcaccacatcgtcgccgggtttatcctgcgcttctggccccagatcgacgcaaatcatgtccatcgccacgcggccaacgatctttacctcgcgaccgttgaccagcaccggcgtacccgttggtgcagcgcgcggatagccgtcgccgtagcccatcgccaccacgccgagacgcgtgtcgcgctcgctggtccaggtgccaccatagcccaccggttcaccggctttgtgttctcgcacggcaatcagagtagacaccagagacatcaccggctggaaacccatgtccggcccccagggtttattctccagcggcgatacgccgtaaagaatgatgcccggtcgcgcccagtcgaaatgcgactgcggccacagcagaataccgccggatgcggcgatcgagcgcatccccggcttgccttcgcagaaggtattaaagatatccagctgtcgctcggtcgcaccgcactcgggctcatcggcacgggcgaagtggctgacaatattcaccggctggcgcacgtttttgcaccggcataaacgctgataaaacgcttcggcgctttccggacgcacgcccagacggtgcatgcccgtatcaagcttcatccacacggtcaccggctcgctcagctcagcggtttccagcgcggccagctgttcttcgttgtgtaccgccgtgtgcagatgctgatccgcgatagttggcagatcggcggcttcgaaaaagccttcgaggagcagaatcggctgggtaatcccccccgcgcgcaggcggagggcttcttcaagacgggcgacgccaaaggcgtcggcatcggggagcgttcgcgcggtctcaagaagaccgtgtccgtaagcgttcgctttcacgactgcaacgagcttgctggcggatgccagttcacgcagacgttgcaggttgtgtcgcagagcgcggcggttaatgacaacagttgccgcttgcatttgaattccttagaaattactcatcatcatattgaggaccggcatagttgtcgaaacgcgaccactggccgttaaaggtcagacgcaccgtcccgatcgggccgttacgttgtttaccaataataatttcggcgatccctttcaggtcgctgttctcgtgataaacctcatcacggtagataaacatgattaagtcggcatcctgctcgatcgagccggattcacgcaggtcggagttgaccggacgtttgtcggcacgttgttccagagagcggttaagctgcgacagcgccaccaccggcacgtgcagctctttggctaacgccttgagcgagcgggaaatttcggcgatctccagcgtacggttgtcggagagcgacgggacgcgcatcagctgaaggtagtcgatcatgataaggccgataccgccgtgttcgcgggcgatacgacgcgcgcgggaacggacttccgtcggcgtcaggccggaggagtcatcaatatagatgttacgtttttccagcagaatgcccatggtgccggagatgcgcgcccagtcctcatcgtcgagctgaccggtacggatgcgggtctggtccacgcgcgacagcgatgccagagaacgcatcatgatctgctcggagggcatctcaaggctgaaaatcagtaccggcttatcctgcaacatcgccgcattttcgacgaggttcatcgcaaatgtcgttttacccatcgacggacgcgcggcgacgataatcaaatccgacggctgcagaccggcggtttttttgttgagatcgtcataaccggtgttcaccccggtcacaccgtcgtgcggctgctggaacagctgttcgatacgggcaacggtggcgtcgaggacgtcggcgatgtttttggggccttcgtctttgttggcgcggctttcggcgattttgaagacgcgggactcggcaaggtcgagcagatcttcactggtgcgaccctgcggatcaaaacccgcttcggcgatctcattcgccaccgagatcatctctcggacaacggcgcgttcacgcacgatgtcagcataagcgctgatgttcgccgcacttggcgtgttttttgacagttctgccagataggcaaacccgccgacgctgtccagctgtccctgacgctccagcgattccgcgagcgtgatcaggtcaattgggctacccgactcctgcaggcgcgccatttcggtaaagatatgacggtgcggacgggtgtagaaatcctcagacaccacgcgctcggcgacgtcgtcccagcgttcgttatccagcattaaaccgcccaacaccgactgttccgcttcaatcgagtgcggcgggacttttaaccctgcgacctggaaatcacgctcgcgaggttcagtctgtttgttgaagggtttgtttcctgccatagtgaatggagttaccgagataaagagtgggtcgaaagattaccacattctggaggaagcatggcaacacgtattgaatttcacaagcatggtggccctgacgtactcaacgcggtggagttcacccccaccgcgcctggcgaaaacgaagtgcaggttgaaaacaaagccatcggcataaactacatcgacacctatattcgcggcgggctctacccgcctccatcgatgccgagtggactgggcaccgaggcggccggcgtcgtcgtcaaagtgggcagcgcggttaagcatattaaagaaggcgaccgcgtggtgtacgcgcaatctccgctgggcgcttacagctccgtccacaacgtcccggcggataaagccgccctgctgcccaacgccatctcctttgagcaggcggcggcctcctttctgaaagggttaaccgtttactacctgctgcgcaaaacctatgaaattaaacccgacgagcagttcctgtttcatgccgcggcgggtggcgtcgggctcatcgcctgtcagtgggcaaaagcgctgggcgcaaaactgatcggcaccgtgggcaatgcccaaaaagcccagcgcgcgctgcaggcgggcgcctggcaggtgattaactaccgtgaagagagcattgtcgaacggctgaaggagatcaccagcggcaaaaaggtacgcgtggtgtatgactcggtagggaaagatacctgggaagcgtcgctggactgcctgcagcgtcgtgggctgatggtgagcttcgggaatgcgtcaggtgctgtcaccggcgtgaatctcggcatcctgaaccagaaaggctcgctgtacgtcacgcgcccttccctgcaaggctacatcaccaaccgggaagaacttgaggaagccagcaacgagctgttctcgctgatcgccagcggcgtcattaaggtggatgtggtagaagcgcagaaatacccgctagccgacgcgcagcgcgcgcatgaggtgctggagagccgggcaacgcagggatcgagcttgttgattccctgagccccaaaaagaaattgggcttcccgtgggaagccctttctttttttagttcggctgtatgtagggtacagcgcgatgaattctttaacggcaatcatagtgacagattcgataagtaaatcctattctgttctaagccaggctgccggaaaagttacaactctgtgacgaacccctcaataccttagtaacggaagcggttattgcgctgataactgggcacttttggcgatttaatcgcccgtatcacccataccaccgccacggccagcagtaaccacggcagcagtttgatcgtcagggcaaacaatccgccaataaacatgacgaccgtcgccaccacgatagccgccagaatgccgagcagcgaaatgcccgttgctaacagcatgacaaaaaagccaatcacaaaaagtagttccagcatggtgctctcccacgagttcccgaatgatgcagcaaacattacaagaatcatgccagacataacgtgttgttcttaaaacaaaacgccccgcgagaattcgcagggcgtggtgaatttgacgaacttttagcgaaagttatcgcttgtccgccaccaggcgcaacgcatgttccagcacctcaatatcggccccggctttatgggcgttttcgctcaggtagcgacgccactgacgcgcgcccggaatgccctggaacagcccaagcatatggcgagtgatatggccgagatacgtaccgctgctcagctcgcgctcaatgtaaggatacatcgcccgcacgacggcaaccggatcggtgtctgcaccttcgatgccaaagatttcgcgatcgaccgtcgccagaatgcccgggttctgatacgcctcgcgcccgaccatcaccccatccatatgttcaagatgcgctttggcctcttccagcgacttgatgccgccgttaatggacatcttcaggtgcgggaagtcacgcttcagctgatacacgcgcgggtagtccagcggcgggatttcacggttctctttcgggctcaggccggagagccaggcttttcgcgcatggatgatgaacatctcgcattcgcccttgccggagaccgtattgatgaaatcgcacaggaattcgtagctgtcctggtcgtcaatgccgatgcgggttttgaccgtcaccggaatggaaacgacgtcgcgcatcgccttgatacagtccgccaccagctgcgcgttccccatcaggcaggcgccgaacatgccgttttgcacgcgatcggacgggcagccaacgttgaggttgatctcgtcgtagccgcgcgcttcagccagcttcgcgcactgcgccagggcggccggatcgctgccgcccagctgcagggcaaccggatgctcttcttcgctataggccagatagtcgcccttgccgtgaatgattgcgcctgtggtcaccatttcggtgtacagcagcgtatggcgggagagctggcgcaggaaatagcggcagtgtctgtccgtccagtcgagcattggcgcaatggaaaaacggtgtgcagggaaagcggtctgtaattctgacgacatggcgaagttttaagcatctggtggaaaaggggcgctactatagcacaaagaaaagccggaggcgcagcgcctccggtggactttagaacgtcatgctcagctgagcccctgcgccccaggtttcgtcttcaccgtacaggcccatcaggtcaacatgcacggtgctaaacggcgcgaaaccgacaccgccggtaaagacattgctgtcgttacccttcacgtcggcacgataacccgcacgcaccgccagccagctcagcggcgttacctcggcaccgacacccacgtactgcgacgtatcttcgctcttgaagcctttggtttcggtcagatcgccatcggcggtcagcgtcaccaggtcgttgtgccaggcagcaccggcggtcaccagcggacggatctgataggtgtctttatagctcaccacttctcccgtacggccgttgcgaatacggatgtctttggtgtcgatatcacgcgacatcaggttttgtccgctcacgcccacggtccagtgttcgccgaaatcggccgcaataccggcatccacgttgaagcccgtatcgtcagtgcggtagcggctgtcgttccacttgttactgtcgtaatcgtagattgacgtggtgtagttatagacccaggttttttgcagttttggcgtaacccccacggaaaccgggacgccacccagatcgaactgacgggcaacagcaacaccgtaatcggagactatcgccgcccggccggatgccgttgagttgaggtttttggtgatctgatccgtaccattcagcgcagcgtccagcgcgacaccggcagccacgacattgcttcgttgaatacggcgaaggtaatcaatatcttgctgatcgatagacgagctcacccggccatgggcatagcctttcgccatgaaggctaccgaaaggacatcgttagggatactcaccgcaagccctgcccctgccgttgcgcgtgcggttttgcctttgagatagtccagctcatcggccagatctttggccgcgccctggaattgattaatggaacctaatggattggtgataatttctcgtggcgtgagattatcaaccacatccttgtagtgattaattttgtcgttgatgttatcaatctcgtcctgaagattgtcttcatccgtgatttgcgcgccaaccgaaggcaatatgaccgtcacatcatcgtccggttttgcctttgccagcagcgcggggttgattaacgccccactaccatagcttcccgaagccacgccggtgccacccattgcgtcgctgcgtgattctgtccaggtattggctgctcccgcctgatttgccataaacaaggagacagcaatgctaaccaccgaaaatttaaaattttttttcacagtatgcccgttatagtctgttatgaaataacccctgtctgttatcacccaaacaggaacgaactattgctgtgaataagtagtaaaagacccgctatttctttccctaagtaaaactcccttacggcctgttatattttgtgacggccctcaatatttatagaagaggaaattattttttcccaggttttccatcatgcggtccaaaaaactgcgggggatgatctacccagcgatcttcccgcgtggcggcatacacggggttgagcgggtagtagatgcggttgtgcttcttgttggcctcgccaacgaccaggagccgaacctcatcgtccgtgttgttgataaaggtatgacagatgccggttccggcgggaaagcctacgctgtcgccaggctccagtttccacaagtggccgttaatccaggcttcagggtagccttcgagcacgtaaacaaactcttcttcgtcgctctccgcatgcggataggacgttctgcgcccaggcggcaggcgctcatgatggatgccaatacgcccgagcccaagcttgcgagccagcggtgcgccaatagaaaacagctcatcgctgtcggggtaggtcgagtcatccgcgccttccacgtcgcgccagtgtcgaatgcagtcaggtcttttcattctggttctcccggttttcgatgggtcaggtatagcacagactggcggatctcggtgtttttagcagaacatgataaagtgaaggttttccgtcctataacatccggggtgctacatggataagtccacaaaagagctgttagcgcaggccgaaaagctgtgtgcgcaacgcaatgtgcgcctgactccgcagcgccttgaagtattacgtctgatgagcctgcagcagggtgccatcagcgcctacgatctgctggatctactccgcgaaagcgagccgcaggcaaagccgccgacggtctatcgcgcgctggatttcctgcttgaacaagggttcgtgcacaaggtggaatccaccaacagctatgtgctatgccatctgttcgatcagcccacccacacatcggcgatgtttatctgtgaccgctgcggcgtggtgaaagaagaggctgcggaaggcgtggaagatattatgcatacgctggcagcgaaaatgggctttgccctgcgtcataacgtgattgaagcgcacgggctctgttccgcgtgcgtggaggtggaagcctgtcgccatcaggacgcgtgtcagcacgaccactctatcctggtgaagaaaaagccgcgttagcggcaaaagaaaaggcggctcatggccgccctcagggtgtacttccttgtactttcgggtgtagcccggttaccagcggtagtcgttgcgtttttcccagtcgcccacttctttttccgcctggtcttttgcgtagccgtaacgctcctggattttaccgacaagctgatcgcgtttaccttcgatgacggtcatgtcgtcatccgtcagcttaccccactgttctttcgctttacctttgaactgcttccagttgccgccgatttcgtctttattcatcatcgtgtcctcttcgttaagcgtcgggtcgtaacgtccgttacgttcttttctgctggacgtgataattattgtagttaaggattccgtggttaatttcatattcggaatctttaaccgtcacgatatatcggagcgcgagggaaaccaggtattgttttgccagtgtcggtgccagataaacgccagcgataatccgcgcagcgagaggaagacggccagggccagccataaaccatgattccccagccaggggagcgtcaggagcgtcaggccaaatccggccgccgcgacagccatactgttgcgcatttcggctccgcgcgtcgccccaataaacatgccgtccagcagataacaccagacgccaaccaccggtaagacgacttgccagatgagatagtggctcgccagctcgcgcagcgcagggagagaggtaagcaatgcaacgatctgctcaccgaagcaggcgtaaaccagaccaaaggccagcgccaccagccccgactgacggcaggcagcccgccagacctcccgtagctgcccgctttcgcgcgccccgtacgcctgcccggaatgcgcttcaaccgcgtaggcaaaaccgtccagcgcataggcggtaaaggtcagaagcgtcatcaataccgcattcaccgcaacgatttccggccccagtcgagccccgaaaaccgtcagcgcaccgaagcagagctgaagaagaagggagcgcagcatgatgtcacggttgagcgccagcagcttacggatattgccgcgccatgcggttttgagcagcgccagggagatcccgcgcatggccagcacacgccggaccatccacaagccaatgataaaggtcccgtattcggcaatcgccgtcgccagcgccgcgccctgcacgttcatatgcagacccatgaccagccagacgtccagaacaatgttgagcaggttacccaccaccagcaaaatcacgggcgcacgggcgtactgcacgcccagtagccaccccagcagaaccagatttgccagcgaggcgggtgcgctgagccagcggatttccaggaaccgtcgcgcctgcgccagtaccgcttcgctgccaccgacaatatgaagcgcaagatcgatcaggggggcccgcaatacaacgattaacgcacccgcgccaagcgcgaggatcagcggctgcaccagtgcgcgcgccagacgcagcggatctttcgcgccataagcctgtgcggtaagaccggtggtactcatgcgcaaaaagagcagcagcataaacaggaagctggttgccgtcgcgccaatcgccacgccgccaagataaaccggtgaatcaagatggcctataacggcagtatcaaccagccccagcaagggcacggtaatattggagaaaatcatcggcagagcaagacgccacaatgccttatcggatgccgtcagcagtgacatgaaagataccgggagtggggaatgaatcaggctacagcggtgccatagcctgtcaggaagagattacagccattcaccgttgcgaatcacgcctaccgccagaccttcaatagagaagctctgttcgcggaggtcgaccacaatcggggtgaactcgctgttttcgggcagcaactgaacagtgttaccctgctttttcagacgcttaacggtcacttcgtcatcaatgcgtgcgaccacgacctggccgtttcgcacgtcctgggttttatgcaccgcaagcagatcgccatcaagaatgccgatgtctttcatcgacatgccgctgacgcgcagcaggaaatcagcgctcggtttgaacatgccgggatcgacctggtagtgaccttcaatatgctgttgtgccagcagcggctcacctgcagcaacgcggcctatcagcggaatgcccgtctcttcttccaccagcaggcggataccccgtgacgcgcctgacacaatctcaatcacacccttacgcgccagcgctttcaggtgttcctcggcagcattcggagaacggaagcccagacgctgcgcgatttccgcacgcgtgggtggcatacccgtctggccgatatgatcccgaatgagatcaaacacctcttgctgcctggtcgttaacgctttcattccgccccctgggtgtatatacagttatgctgtgagtatatacagtcaaaggcgattttggaaccaaaaactgcacaaaaaaccagggacttaattattcctcgaggctcatcggaaatgtgaccaaagcagggtgacccaggtgataacggcagtgataatcgccagcaacacggcagcagagcccatgtcttttgcacggccagaaagctcatggaaatcggaaccaatgcgatcaacaacggcctcaatagcgctattaagaatttccactatcatcaccagaagtacggaaccgataagcagtacgcgggtaatcgcatcaacatcaaggaaacaggcgacgatcaccgcgatgattgcggcgacgccctcctggcgaaaagcggcttcgttgacccatgcggcacggaaacctttccatgaatagccggcggctttgatgatacgcgttaacccagtggtattattggccattaaaagaaccttttttaaaaaagagcgtcattaacatgaggcggagcgcgtttcgctacagcctgaagtatgacgggtaacaacagaaattttgcgcgctttctgttatccttgcgccgcaattgcattattaaccagaggctttacatcgtttatgtccggctggccacgaatttactataaattacttaatttaccattaagcatcctggtaaaaagcaagtctatcccagcagaacccgcgctggaactggggctcgatacgtcgcgccctattatgtacgttttgccttataactcgaaggcagacttactgacgcttcgcgcccagtgtctggcgcatgacttacctgacccgcttgaaccgctggaagttgacggtacgctgctgccgcgctacgtcttcatccacggcgggccgcgcgtgtttacctattacacgccgaaagaagagtccatcaagctgttccatgactatctcgatctgcaccgcagcaaccccgatctggatgtgcagatggtgccggtatcggtgatgtttggtcgtcgtccgggtcgtgaaaaaggcgaagagaatccgccgctgcgcatgcttaacggcatccagaagttcttcgcggtctcctggctgggacgcgacagctttgtgcgcttctccccttccgtttcgctgcgtcgcatggcggacgagcacggcaccgacaagatcatcgcgcaaaaactggcgcgcgtggcgcgtatgcacttcgcccgtcagcgcctggcggccgtagggccacgccttccggcgcgtcaggacctgttcaacaagctgctggcctccaaagcgatcgcccgcgccgttgaagatgaagcgcgcagcaagaaaatttcgcatgagaaagctcagcagaacgccattgcgctgatggaagagatcgcagcgaacttctcttacgagatgattcgcctgtccgatcgtattctcggctttacatggaaccgcctgtatcagggcatcaacgtgcataacgctgagcgtgtacgtcagctggcgcacgatggccatgagattgtctatgtcccctgccaccgcagccacatggactacctgctcctttcctacgtgctctatcaccaggggctggtgccaccgcacatcgcagccggtatcaacctgaacttctggcccgcgggcccgattttccgccgcctgggcgcgttctttattcgtcgtaccttcaagggcaacaagctctactccaccgtgttccgcgagtatctgggcgagctgttcagccgcggctattccgtggagtacttcgtggagggtgggcgttcccgtaccggtcgtctgctcgatccgaagaccggcacgctgtcgatgaccatccaggccatgctgcgcggcggtacccgtccgatcacgctggtgcctatctacatcggctatgagcacgtgatggaagtgggcacgtacgcgaaagagctgcgcggtgcgaccaaagagaaagagagcctgccgcagatgctgcgcggcttgagcaagctgcgcaatctcggtcagggctacgtgaacttcggcgagccgatgccgctgatgacctacctgaaccatcatgtgccggaatggcgcgagtccatcgatcctatcgaagcggtgcgtcctgcctggctgacgccaacggttaacggcatcgcgtccgagctgatggtgcgcattaacaacgccggtgcggctaacgccatgaacctctgctgtacggcacttctggcttcacgtcagcgttccctgacccgtgaacagcttacggagcagctggattgctatctggacatgatgcgtaacgtgccgtattcggttgactcgaccgtgccttctgcaaccgccagtgaacttatcgatcacgcgttgcagatgaacaagtttgaagtggagaaggacacgatcggcgacatcatcattctgccgcgcgagcaggccgttctgatgacctactaccgcaacaacatcacgcatatgctgatgctgccgtcgctcatggccgccattattacccagcatcgtcatatctcccgtcaggagctattgcgccatcttgagaccatctatccaatgctgaaagcggagctgttcctgcgctggagtaaggatgagctggcgacagaactggataagatgacggaagagatgcgtcgccaggggctgattaccctgaacaacgacgagctgcacatcaatccgtcacgctcccgcaccctgcagctgctggcggccggtgcgcgcgaaacgctgcagcgctacgccatcacgttctggctgctgagcgcgaacccgtccatcaaccgcggtacgctggagaaagagagccggacgctggcccagcgcctgtccgttctgcacggcattaacgcccctgaattcttcgacaaagcggtcttcagttctctggtgctgacgctgcgcgatgaaggcttcatcagcgatacgggtgatgccgagccggaagagacgttgaaggtgtaccagatgctggcagagctgattacctcggacgtgcgcttaacgattgagagcgccacgcagggcgagtaacacaatgccgggttatggcccggcctgacgccctggataataaaaaggcccggtaagcgctgacgctaccgggcctttttttgccttgttaaatcagtgcatttagctgagcagcgtaaaggcaatcatcccgacaattgcacccgtcgtgccgaggatagtttccatcagcgtccaggttttcagggtttgcgcttcggtggcaccggtaaacttaccgaacagccagaagccggcgtcgttaacgtgagagaccacaatcgaaccgcccgcgatacagatagagagcgcggccatctgggcaccggagtagttcagctgttcaatcaccggcatcaccagacccacggcggttaaacacgccacggtggcggaaccctggatgatacgcaccgccgcagccagcacaaagcaggtgaccgcaatcggcaagcccatcccggtcagcgcttcgcccagagccgggcccacgccggaatccaccagcacctgcttgaacacgccgcctgcgccgataaccagcaggataatccccgcaggctgcagcgccgcaccgcagatctccatcacccggtcttttggcatcccctgacgcatcgccagaccgtaaatcgccaccaggcacgccaccaggatcgccgtgaacggatgaccaatgaactcaaaccattcgtaggcggtagaaccgaccggcacaaagcgcgcggcgatggttttcaggcccaccagcaccagcggcagcaggatcagcgacaggctgaagccaaaggatggcattttgccctcgcccaggtgcggctcggtaatgtcgtccggaatgtgcagctcaacgtaacggctgatgaagttgccccacagcggaccggcaataatcatccccgggattgccgcgcacaggccaatcaggatcatccagccaaagtcagcgtgcatctgggacgccagcagcatcggcgcaggccccggcagcagaaacgctgcggctgccgccacgcccgcaaacagcggaatgaccagcttgacgaggttagtgccggtatggcgcgccatagaaaacgcgacgctgatgagcagcacaacggccacttcgaagaacagcggcagcgcgcaaatcagccctgccagaccaatcgcgtagtgcgcgcggctgtggccgaaggatttcagcatcttgacggcaatctggtcgaccgcgcccgtctcgtgcaaaatcttgccaaacatcgcgcccagcgctaccacaatcgccaggaagcccagcgtaccgcccatccctttttccattgtcgcggcgatcttgtcgagcggcataccggaaaagagaccagcaccaatagaaaccaccatcaaagcaacaaaggcgtgcatgcgcgccttcatcactaaaaacaacagcagcaataccgaacctactgctgtcaaaactagcgttaatgtactcaaaacttactgccttttattaatgacctcgatggtgctggcaacaacaccctccagtgactgatcgatatcaaccactaagacgtctttttcgtcttcacccggctcctgcagtgcttcaaactgcgtcaccagcatctgggttttgaagaagtgacctttacgcgccttcaggcggctttcaatcacctcgaaatcccctttcaggtagatgaaagagaggttcggattgccgtcacgcagcagatcgcggtaggtttttttcagcgcggagcagacgatcagggagactttattggtgcgctgcatcgcgaacgcggcgtcgttcagcgcctgcaaccacggtttacggtcgtcgtcgttcagcggctcgccggaggccattttcatgatgttgctgcgcggatggaggaagtcgccatcaagaaacgcagcctggagttgatgcgccacttcgctggccacggctgatttcccgctaccggaaacgcccatcaggacgtagacgtggtgatcgtgattagtcgtgctcaaagggtgtccctcagtcaattgttacgggtaacagttatcggtaacattgtcctgccggggcaaaagagaagcaatatccaaacgtgcgcgaagtgaataagtgtgagctacttcaaatttgtcagttcaaatagatccacccggtgacaaggtgaaacctaaatctaacattttcggcgtaaccgtctcgccacgaatgcgcgccagcaggcgttctgcgccaatgcggcccatacgttcacgcggcgtcaggacgctcgccagacgcggctccatcacctgaccgatgtcatggccgtggaaaccggcgatcgccatatcatcagggatcttcagccccagacgctggcactcaaacgctgcgccgaccgcaaggtcatcgttggtacagaaaataccgtccagttgcggatactcgcgtcgcgcctgacgcatcagctcaatacccgacgtataggaagaggactgctccaccatcacgctgtacggggttaagttcgcgtctagcatcgcctgctcgtatcccttctgtttgatgatagtacgttcatcaagacgcgcacccagataggcgatatgacgatgcccgcgggcgataatggccgccgtcatctggcgcgccgcttcgaagttatcaaagccgacggcgatgtcgaggcacggcgactggctgtccatcagctccacgaccggaataccggccacttcaatcattttgagcgtgcgggcagtgtgggtacgttcggttaaaatcaggccgtcaatgttccaggaaagcatcgattcaagacgttcctcttcgagttccggcttgtacccgtagtgggcgagcatggtctggtaaccaaacgcatcggtgacgctttcaattccacgtaatacttcggcgaaaacctggttggtcaaagaaggaagcagaacgcccaccgcgcggctggtcgcattcgagagaatatcgggtgcacggttggggatgtaacccagttcatcaagggcagcggcaatcttgccacgtaacgccacggaaacctgttccgggttacgtaaaaaacggctgaccgtcattttggtcacaccgacgcgatcggcgacatcctgaagtacggggcgtttctttttcatcgtcctgagaaatcttgaagtgagagattcgctcagtttaccacggacaaagcccatccttcccctgtcaaagggaaggatggggatttatttatgttttattacaccggcggcaggtcaaacagcagaatttcgctttcgctgtcggcatgcacggagatcgcctgctcatcccagatggccagaccatcggcggttgtcgctttggtgccgttgatggacacctcccctttcaccacctggatccagacgcggcggttagcggcaatctgatgcacggactgttcatctttcgccagcgcccagcggtacagctccatatcctgatgcactttcagggagccttcacgcgcatccggggagagcaccagctgtttaccctgtttggcgtcgaagcggcgctgctcgtagcgcggcgtgatgccggtctcttctggaatgatccagatttgatacaggtgcagtttttccgttttgcttgggttgtactcggagtgacgcaccccggtacccgcgctcataatctggaactcgcccgccggaacctgctctttgttgcccatgctgtcctggtgctcaaccgcgccttccagcacataggtcaggatttccatgtctttgtgcgggtgggtaccaaagccctggcctgcatcaatcacgtcgtcgttaatcacccgcagtgcggagaagcccatgaagttcgggtcgtagtagtcggcaaacgagaatgaatgccatgagtccagccagccatgattcgcgtgaccacgttcgtttgctttgcgtaagtagatcattgttttcaccctcagttcgtttcgatggagtaagtgtggacgcaaacggcctgggatcatagagggtgaaaattgactcctctgttcaaaaattgtgaacaagttcagaggagccgtttttgcttattttgcgagggttaccgtggcaggagaagcctgtccgaaggcccgctcaaggatttcgaggttggtcagaacgtcagattccttgacgtaattcgccgtgccgtttgtgagggtctcaaacagcgcatcatagacgcggccatagtcgccggtttccggcttaagcgtttctttgaccgtcacgccctcatcgttcacatactccagcacgcccacggaatcgtccgccgcaaagccaggttcaccgggcatgatattggccttcaggctggtctcctgctggtcgataccgtatttgataaacgaaccttttgtgccgtgaacgataaatttcgggtagtcgatcttcaccaggtggctggttttgacgatggctttaaggtcgccgtagaacagctgggcttcgaaggtatcgtccgggttggctttattgcgcaggctgcgaatgtcatacgtcacgtggtccgggcggccaaacagggagatgatctggtccatggtgtgcacccccagcccgtagaacgaaccatcctgcggcagtccgggttgcgtttccgccaccgggcggtagtaatcgaagtgactttcgatctccacaatgtcgccgagcttgccgctttcaatcgctttttttgccgtcaggaagcagctgtcaaagcgacggttctgatacggcgtgacggtcaaccctttacttttcgccagcgcgaacagcgctttcgcttcggcgatggtcggggtgaacggcttttctaccagcacgtttttgcccgcttccagcgcgcgtttcgcatagtcaaaatggctgtcggcgtgggtgcagacaaccaccagcgtgacctgcggatcgttaagcacctcatcgagatcgctggtgaaatggatgtgggagtactgcggagactgctcctccggcttcgcgcggcggcggtagatatgggccacatgccaggtatctttacggttgaggacatacggcaggtgatagcgggtggtgcttttgccaaatccaataaatgcacagtgtagtgtcatggctcagtccttttggaaggttaatgagtctaaccataacaaaaaaaaagccagctaaaagctggctaaagtaatactggaagcaatgtgagcaatgtcgtgctttcaggttcccgtagcggtcttcctgaatgcagagcaataataatcattctcattcgcacttgtccaatattttttgcaaaaaatagcggttgactcaaattttaaagtcattgatgttggaagggccttttaactgactgaggaacaaggaatgagtgagatagtgatacgccacatcgaacccagcgatgcagaagctttacgtgacatcatgtcgcatcctgatgtgtatcacgacacgctacagctccctcatccttctatggaaatgtggcacgaacgcgttgcgacaaaaccaggccggcgccatctcgttgcctgtctggaccagcgcgttattggacatatggcactggacgtaatggaaaacccgcgtcgcagccatgttgccacattcggcatcagcgtggctgcggatatgcagggacgcggcgtaggccgcaggctcatgagcgagatgatcaacctgtgtgacaactggttgcgtattgaacgtatcgaactgacggtctttgccgataacccctcggcagttgccctctataaaaattttggttttgaaatcgaaggaaccggcaagaaatttgccctgcgcaacggcgaatatgtggacgcgtattatatggcgagaatgaagtaatgatttgccgggtggcggcttcgccttacccggcctacgttcgtgcagttgtaggcccggtaagcgcagcgccaccgggcaacacatcaataccccgccgtcaaatcatccaccgaacgcgggtctgatgcgccaaacagcgctccgtccggccccaccataatgctctgggtgctgcccatcgcctccttcaccgccaccttctgcccacgctgctcaagcagtttaatggtgtccgggctaaagcccttctcgacgcgcagctcgtccggcagccactggtggtggaaacgcggggcgttagtcgcttcggcgacgttcatcccaaagtcgatgctgttcaccaccatctgtaatacggtggtgataatccggctgccgcccgggctaccggttaccagccaggttttgccctctttcaccacgatggtgggcgacatggacgacagcggacgtttcttcggccctaccgcgttcgcatcgccgccgaccagcccgtagacgttcggcacgcccggcttggcagagaagtcatccatctcgttgttcagcagaatgccgctgttgcccgccacaatcccggtgccgaaggtggtgttgagcgtataggtcaccgccaccgcgttaccgtctttatccaccaccgagaagtgggtggtctggttgctttcatacggcgccagcttgccgggacggatctcgctcgacggcttggccttgttgatgtcgatctgatcggcaatggatttggcgtacgccttgttggtcagcgcctgccacggcaccttcacgaagtccggatcgccgagatattccgagcggtcagcgtaggcgcgtttttccgcctccgccattatctgcatggcatccgcgctgccgaagccgaacttgtgcatatcgaagttttcaagaatgttgaggatctgcacgatgtgaatgcccccggaagacggcggcggcatggagaagacctcgtacccgcggtaggtgccgctaatcggctcgcgctccaccgccctgtattccgccagatccgctttggtgatgagcccgccgttcttctgcatctcttccgcaatctggtcggcaatcgcccctttgtagaaggcgtccggaccgtgctccgcaatcagctccaggcttttggcgaggttcttctgcaccagcttatcgcccttcttcagcggttcaccgtctttccagaagatcgccttgctgttttcgtgattcgggatgacttcgctgccgtaggttttgaggtcgtctgccagggcgtcattcaccacaaagccctcccgcgccagcttgatagcaggctgcaccaccttgttcagcggcatcgtgccgtatttttccagcgccagcgagaagcccgcaacggtgcccggcgtgccggaggccaggtgcgaggtcagggattttttactgtccgggttgccctggtcatcgaggaacatgtcccgtgacgcctgagaaggcgccatttcacggaagtcgatggcggtggttttcccgtctttggtgcgcagcatcataaagccgccgccgcccaggttccccgcctgcgggtgcgtcaccgccagcgcatagccgacggcgaccgccgaatccaccgcgttaccgccctgcctgagaatatcgacgcccacgcgggtcgccagcgcatccaccgacgccaccatgccgtgggttgcccgcacgggatgaaagacatcttcctccacgccgtaagagaccggaggcgccgcgggcgggttggccgccacgctaaatgtaccgcctgccatcagcgcggcgagggcgacccagcgcaaaaacgttggtttcatcattattgttctccaggtgaagggatccatattccccgcttaagcctggttcacaactcctaaaaaatcatcgtcatggtgaaatcagggtaaacttaagagagacctcaaaaggaggaaatgacaatgaaacgcttattgattcttacggcgctgatcccctttgccgcgctcgcacagccactcaatacgatgaacaaccctaaccagcagggttatgtcatcccgagccagcagcgtatgcagaccgagatgatgagccagcaacagcagcaaaaagggatgctgaatcagcagctgagaacgcagacccagatgcagcagcaaagcctgcaaaatcagatgaacgccaacacccagcgcgtgcagcaggggcaggtgcgcgagcagccgctgccgaacagaaacggcggaatgttaggtggaatgacttcgtcaggcagcggacagcagcatatgctgccgccgcagtcgaatggcagtatgcttaatccgcagaactaaagtccgggccgatcaggtcaatcgcatcggtacagatgctgtccacgccccagcgcagcagttcggctgcacgctggggtttgttgacggtgtaaaccagaatatgcagacccgcgtctttcagcatcgtcacccgcgcctcatccagcagcttgtgattaagatgaatagagacacacgctaagcgcgtcgtcagctcgcgccagtcctcgcgccactcgtccagcagcagcccgcgcggcaactccggcacggccgcctgtgccgcctccagggcgtcaatttcaaacgaggagagcagcggcgcggtcatcccttcccacagctcgcgcgcggcaagggcgatcactttgccggtcagcggcccggtgccggtggtcggtttgatttcgatattggccatcatgccgtgctggcgacagcggtcggccacttccgccagcagcggcagcggttcgcctttgaattcgccgctgtaccagcttccggcgtcgactttcagcagatcgcgccacggcagctcgcccgccacgccccagccgttgctggtgcgttcgaggttatcgtcatgcagcaggaaaatctcgccgtctttcgacagcttggcgtcgaactcgatcatggtgtggccgtaacgcgcgccaacatcaatcgccgccagggtgttctccggcgccagcttaccgccgccgcggtgggcgacgacgtggggataaggccagttgctcatactcgttgtcctgtttcaccgtcaaaaaggtgcagatgattttccggcaggtgcagccacagcgtgctgcccgctttcgggcgctcctgatgcgccagacgcaccaccatcttttgctcgccccagcgcccgtgcgccaggttatctgcacccaacatctccagcgtgtccatcaccagcggcacgccgccttccgcctgagaggttaaaccgatatgttccgggcggataccgagcgtcatcttacgcccggcgtagccacgatagtaccagttgatcggcaatgccatcccgctttccagctcaaagtgcgtgcccgtgctgctgatgcgcccttcgagcaggttcatcgccgggctgccgataaagctcgccacaaagcgggtggccggtttctcgtagacttccacgggggtaccaatctgctcggcaacgcctttgttcatcaccatcacgcgctgggcgagggtcatggcctcaacctgatcgtgggtaacgtacagtgacgtggttttcagacgacggtgcagctgctgcagctcaagacgcatctgcacgcgcagcttggcgtcgaggttagagagcggctcatcgaacaggaataccgccggatcgcgcacgatggcgcgccccatcgccacgcgctggcgttggccgccggagagttcgcgcgggcggcgcttgagcaggccgtccagctccagaatgcgcgccgcttctttcacgcgctcctcaatatggcctttgcccatgccgcggattttcagcccccaggccatgttctcctccacgctcatgtgcgggtagagagcgtagttctggaacaccatcgcgatgcccctgtctttcggctccatctcggtgacgcgctggcggtcaatccagatatccccggacgttacgcgctccagccccgccaccatgcgcagcagcgtagatttgccgcagccggacgggccgaccatcacgataaactccccgtccgccacgtcgagcgtcagcggctgaatcacctgggttttgccgtcccagcttttggttactgcctgaagttttaaacctgccatcttatttctcgctatcgaccaggccgcggacaaacgcgcgctgcatggctaaaacaatgactacgggtgggattagggtgagcagcatcgccgccatcacctggttccagagggtggtgccttcgccggtggcaatcatgcctttgatgcccgccacggcggtaccgagattgacgtcctgaataatcagcagcggccacaggtactggttccagccgtagataaaggtgattacaaacagcgccgcaaggttggttttcgacagcggcagcacgatgtcgcggaagaagcgcatcggcgacgcgccgtcgatgcgcgcggcttcaatcagctcgtccggcagggtcataaagaactggcggaacaggaaggtggcggtcgccgaggccatcagcggcagggttaggcccgcgtagctgtcgagcatcttcaggttggcgatcacttccaccgtcgggaagatacgcacctccaccggcagcatcagggtgataaaaatcatccagaaaaagaggttgcgcagcggaaagcggaaccagacgatggcgaaggccgagagcatcgacaccgtaattttgccgaccgtaatgccgaacgccatgatgaagctgttgagcatcatcagccagaacggcgcgctgttggcgcccacgccctgggtccagatggtcttcatgttctcgaacagatgtgtgcctgggatcagcgtcatcggcgtgtcgaacaccgctttggtgtccagcgtagcggcgacaaaggccacgtacagtggaaacaggatgacgataatccccagaatcagcatggtgtggctgaaaatcgtcagcccgcgacggttctcaatcattggtagcgcaccttactttcaacatagcggaactgcaccaccgtgaggatgatgacgaggaacatcagcaccaccgactgcgcggcggaggccgagagatccagcccggcgaagccttcgcggtagatcttgtagataagcgtcgttgtcgcctgcaccgggccgcctgcggtggccgcatcgatcaccgggaaggtgtcgaagaaggcgtagacgaggttaaccaccagcaggaagaagctcaccggggcaatcagcggcagcgacagcatgaagaagcgacgaatcggccctgccccgtcaatggcggcggcctccaccagcgaacgcgggatggactgcagcgcggcaaagaagaacaggaagttgtagctgatctgcttccacaccgaggcgaataccaccaggaacatggcctgaccgctgttctgggcgtggttccagtcgtagccgaactctgccaggaaatgggtaatcagcccgcgccccgggttaaacaggaagatccacagcacggcggcgacggcgggcgccacggcgtacggcagcagcatcagggtctgataaatacgactgccgcgcaccacatagtccaccagcgcggcgaaaaacagcgaggcaacaaggccgctgacggtgaccagcgcgctgaaccttatcgtcgtccagaaggcgtccaggtagtagctgtcatggaacagcgcggtaaagttatccagcccgacaaactggctggagagcccaaacggatcgacgctttgtaccgagtaccacagcgcttcgcccgcaggccagataaagaagataacggtgatgaccagctgaggcgcgaccagcaggtacggcagccagcgggaacggaacaccggacgggatgatgacattgagattgggttcctgagcaatgccgggtggcggctacgccttacccggcctacaaatatttctccctctccccgtgggagagggttggggtgagggcatcagcccgcacgatccccgtaggcccggatcgctacgcgtcaccgggcgaatcacggattacgatttcgtcgactgctcaaagcggcgcagcagctgattcccgcgctctaccgcggaatccagcgcctgctgtggcgttttcttcccggtccagacgctttccagctcttcatccacgatggtgcggatctgcggcatgttgcccagacgcaggcctttggtgaacggcaacggcggcttgttcagcatctgacgcgtcgcgatatccgcgcccgggttcttgctgtagaagccctgctcgcgggtcaggtcatacgcggctttggtgatcggcaggtagccggtcttctggtgccactcggcggcgttttccggcttcgccaggaagtcgaggaactcggccacgcctttataggtgcccttgtctttaccctgcatcacccacaggctcgccccgccgatgatggcgttctgcggcgcgcccttcacgtcggcatcgtacggcatcatgcccacgccgtagttgaatttggcgtagtggcggatatccgccagcgagccggacgaggcggtggtaatggcgcaatcgccgttgtagaacttctcggtggattcgtctttacgcccgaagtagctgaagtcacccttcttgttgagttcttccagcagcgcgatgtgcttcacctgctccggcttgttgaactccagtaccgcgtcggtgccgtcgaagccgttgtttttggtcgccaccggcaggccgtgccaggcgctgaagttttcgatctggatccagccctgccagccgctggcgtagccgcacttcattcccgccgctttcagcttcgcggtgtattcggccaggtcctgccaggtttttggcggctgctccgggtctaaaccggctttcttgaaggcgtctttgttgtagtacagcaccggcgtggagctgttaaacggctgagacagcagatgtccggttttggaatcggtgtagtaacccgctacggttggcacgaactgggattcatcgaagttaatacccgcttctttgaacacttcatagaccggcttgatggctttggaggccatcatggtggcggtgcccacttcataaacctgtaacagtgcaggcgcgttgccggtacggaaggcggcgatgcccgcgctcaggctctgctcgtagttacctttgtacaccggcacaattttgtaatccgggtgggtgtcgttgaaacgctgcgccagggagtcaacttctttacccaactccccttccatggaatgccagaacggaatggtcgtcacagccattgcgttcgtcgcaaaagccagacccagtgccagacccaaagctgtgtgtcgtaacgatgtcattgtcatctctcttattgtgccggatgcgcgatatcacgcgttttatgctcgcgaggtaacatgacatgctcgaatgacagaaaaataactgtttgtttacagataagtgacagcaaagggtcagggggatgatggttgtgtgaaggggtgtagtggttaaaaagccgggtggcggctacgccttacccggcctactcgatccctgtaggcccggtaagcgcagcgtcaccgggcgatacagacggctcagccgcccaggtaagcgctccgcaccgcttcgttcgccagcagtgcgtctccggtatcctcaagcaccacgcggccgttctccagcacgtagccacggtcagccagcttcagcgcctggttggcgttctgctcaacgaggaagatggtcatcccctctttacgcagctgctcaatggtgtcgaagatctgctggatgatgatcggcgccaggccgagcgacggctcatccagcagcagcaggcgcggctgactcatcagcgcgcggccgatcgccagcatctgctgttcaccgccggacatggtgcccgcacgctggatgcggcgctcccacaggcgcgggaagagttcgtacacccacttgatgcgggtctggtattcatcgcggtgggcgaagaagccgcccatcgccaggttctcttccaccgtcatacgcgagaacacgcgacgcccttccggaacaatcgccaccgcctcgcgcatgattctggcggtctgccagtcggtaatgtctttgccgtcaaacacaatccgcccgctggtggcgcgcgggtcaccgcacagggtgccgagcagcgtggtcttacccgcgccgttggcgccaatcagggtgacgatttcaccctggttgatatgcaggctgacgtcgtgcagcgcctggatcttgccgtagtgcgcattgaccttgtcgaacgttaacatcgctttttccatcttatgcctcacccaggtatgcgcggatcacgtccgggttgttgcggatctcttccggcgtgccgtttgccagcggcgtaccctggttaaccacgtagatacggtcggaaatgcccatcaccagcttcatgtcgtgctcaatcagcagaatggtggtgtcgtggtgatcgcgcagttcggcaatcagctcgtccagctctttggtctctttcgggttgaggcccgccgccggttcgtcgagcatcaggatttccggctgcgtcaccatgcagcgcacaatctccaggcgacgctgatcgccgtaggccaggttgctcgcctgacggttggcgtgctgcagcaggccaatgcggtcgagccaggtggcggcgcgatcgagcgcttcatcctgggcgcggcggaaggccggggttttcagcaggccggagaacagcccggttttcagctgctgatgctgcgccaccagcaggttctcaatcaccgtcatctcgcggaacagacgcacgtgctggaaggtacgcactacgcccatgcgggcaatctgctggcccggcagcccttcaagatgctgatcgcgcagcatgatggtgccgcccgtcggcttgtagaagccggtcaggcagttaaagaccgtggttttccccgcgccgttcgggccaatcagggagacaatctctttcttgtgcaaatccagattcacgttgttgaccgccagcaggccgccaaaacgcatcatcagaccgttaacggataataatggctgactcatgcctgttctcctttcgcttgcccgttcttcagcttcagctgtggacgggtcatcggcagcaagccctgcggacgccagatcatcatcagcaccatcaaaccacccagcattaacatgctgtattcgttaaagtcgcgcatcagctcgcgcgagaccaccagcaggatggccgccaggataacggcgaactgcgagcccatcccgcccagcaccacaatcgccagcacaaaggcggattcggcaaaggtgaaggattccgggctgacgaagccctgacgcgcggcaaacagcgtcccggcgaaaccggcaaacgcggcgctgatggtgaacgcggtcagcttgatgcgggtcgggttcaggcccagggagcggcaggcgatctcatcttcgcgcagcgcttcccacgcgcggcccagcggcatgcgcagcaggcggttaatcacgaacagggtgatgaccaccagcagcagcgccaccagatagagccagatgacgcggtcggacgggtcatacttcacgccgaagaagttactgaaggtgtcccagccgccttcgcgggcggtacggctgaactccaggccgaagaaggtcggtttcgggatctggcttatgccgttcgggccgccggtcacttcggtgttgttcagcagcaggatacggacgatttcaccgaagcctaaggtcacaatcgccaggtagtcaccgcgcaggcgcagcaccgggaaaccgagcaggaagcctgcggcggcagagaccagccccgccagcggcaggcaggtccagaagccgagcccgtaatagtggttcagcagcgcgaaggtgtaggcaccgatggcgtagaagccgccgtagcccagcaccagcaggcctgagagccccaccaccacgttcagaccgaggccgaggatcacgtagatcatggtcagggtagcgatatccacggttccacgagacaccacgaacggccacgccacggcagccaccagcagcgccacgaggaacagcttctgcttaacggtagacccgtcgatggccggcaggacgaatttcggcccggagacgtttttcagcgacttctggaacagcggacgcagcagctggaacaggaacaccacggcggtaccgataaacacccactgccagcggatgtcgggggcggtatccaccaccagtttggtgccattcagctcaagctggacgcccataaagacgcccgccagcacgaagaacatggcggcagagagcagcgccattgcaaaatgcatcggtttcatactttctctacctccggacggcccagaataccggtaggcatgaccagcagaaccagaatcagcagggcaaacgacaccacgtctttatattcggtgctcagatacgccgaagagagcgcttccgccacgcccaggatcaggccgccaatcatcgcgcccggaatactgccgataccgcccagcaccgccgcggtaaaagctttcatcccggccataaagccgatgtacgggttgatcacgccgtagaactggccgagcagcacgcctgcgacggcagccatcgcggcgccaatcacgaaggtcagggcaatcacgcggtcggtattgatgccgagcaggctcgccatcttcaggtcttctgcgcacgcgcggcaggcgcgtcccatccgcgagtagcggatgaacagcgtcagggccagcatcgcaataaaggtcacgacccagataaccagctgcatggtggtgatagaggccgcgaagttttcgctggctcccacaatccactggccgttaaacaggcttggcagcgccacgtcgcgcgagccttcggtcaggctgacgtagttttgcaggaagatcgacatcccgatggcggaaatcagtgcaatcagacgcttggagctgcgcaccggccggtaggccacgcgctcgatgctccagccgtaggcgctggcaatcacaatcgcgccgacaaacccggcggcgaccagcagccagctgctgtcgatgcccatcatcatcagggcggcgataatcataaaggagacatagctaccgatcatgtagacctcgccgtgggcgaagttgatcatgccgataatgccgtaaaccatcgtatagccgatggcgatcagcgcgtaggtgcttcccagcgtgacgccgttaaacatctgctgcaggaaatagagaaactgctcggacatatgcaaacctttttatacccgcccgtcatgccgggcggtgggataattatttggcggccgaagacgaaccgtcggcgtgccacttaaagacaccaaactcaaatcccttcagatcgcctttctcatcccagttcagcggcccaatcacggtgttcgccccgtgtgcttttaaatctttcaccagatccagcggttctttgctgccggtacgatccagcgcggtggccagagactgtacggcggcataggtgatccagacgtacggaccactcggatctttcttctgcgccttgagcgcatccacgatagccttgttggccggatcctggtcatagcgttttggcatcgtcaccagcatgccttcggcagaatccccggcgatgttggacagggaggcattgcccacgccctctggccccataaactgagttttcagaccggtggcccgcgcctgacgcagcatctgccccatctccgggtagtagccgccgtagtaaacaaagtcgatattctctttttgcagacgggcgatcagcgcggagaagtctttctcaccggcggtaatgccgtcgaagaagacgatgttcgcgccgccttttttcaggccgtcctgaacggagcgcgccaggccttcgccgtactgctgcttgtcatgaataatggcgatacgctgcggcttgacggtttcaaggatgtatttggcggcggtaggcccctgagaggagtccagaccggcggtgcgcatgatgtgctggtagccgcgctgggtcagctcagggttagtggcgccaggggtgatcatcagaatgccttcgtcttcgtagatgtcagacgcgggctgggtggacgatgagcacaggtggccgatcacatactggatgccatcgttgacgattttgttggcgaccgcgacggcctgtttcggatcgcaggcgtcgtcatactccacgcccaccagcttgtcgcccttgatgccgcccttagcgttgatgtctttgatggcctggcgcgcaccgttgaactccatgtcaccccactgggcaacagggccggacatcgcacccactaccgcaacttttatgtcttccgccatggcggcatgcgagatcgacagtgcgaccatccccgcgattaacgtcttcgcgttccttttcatctctgaatccccattcgtgatgtcgtgtttatattttgttttattatggttaaaaagcattctgtacttttaatgaacaacgctatttttaccagtgcctttaatggtttagcgcaggtttttgtcaaaaaccagactaaaatctctatttttcaggcgattaagcaaagataatattctgaaatcaggcagagataaacaaataaaagtgcagtttgcagcataaaataacggtacaaagcgccgaataaatcactgccattcaggttaaaatcctgcttatttttcgatccatgtgttttcaaactgcccaacgcgctgccaaaaaactaatcacctggcaaacggcgataaaaagaggaagccgctgagcgaataaattgagtacactgcccctactcaatttgatttggacaagcagctaatgaaactgactatcgtgcgtctggtgacctttagcgaccaggatcatatcgacctgggcaagatctggccggaatattccccttcatcgctggccgtcgacgaaaatcaccgtatctatgccgcgcgctttaacgagcgtcttctggccgccgttcgcgtaacgctgagcggcacggaaggggcgctggactcgctgcgcgtgcgtgacgtgacccgccgtcgcggcgtggggcagtatttaattgaagaagtgctccgcgaaaacccgggcgtgacctcatggtggatggccgacgtgggcgtggaagaccgcggcgtcatggcggcgtttatgcaggcgttagggtttacggcgcaggagagcgggtgggagaagcgctaaaagaaagccgggtggcggctgcgccttacccggcctacaatttctaccgcattttcccaagcatttcgtgttgcaggaaggcggcaagttatgaaatccccgggagcttacataagtaagtgaccggggttgaataacgcagccaacgcacctgcggcgcgaaaggcgacgggaaaattatttggcgtctgtcgccgtgccgttcgcatgccagtcaaacacgccgaactcgaagcccttcaggtcgcccttcgtgtcccaggagagaggccccataacggtttcgacggtgttcgctttcagccaggtggcaatctcagccggatcggctgactggttcaggcccgcctgcagcgactgcagcgccgcgtaggtggtccagacgaacgcgccgcttggatcctgtttcttcgccttgatggcatctacgataggtttgttcgcagggacctggtcgtagttcttcggtttggtcaccagcaggccttcggcggattcacccgcgatgttagacagagaaacgttcgccaccccttccgggcccatgaactgggttttcagaccggccgcgcgcgcctggcgcaggatctggcccatttccgggtggtagccgccgtagtaaacaaagtcgatattctctttcttcagacgcgcaaccagcgtggagaagtctttctcaccggcggtgatcccgtcgaagaacaccacgtcggcattggctttcttaaggttgtcctgcactgaacgcgccagaccttcaccgtactgctgcttgtcatgaacaatggcaatgcgtttcggcttcactttttcaacgatgtatttcgccgcggttgggccctggtcagagtccagaccggtggtgcgcagggtcagcttgtaaccgcgtgcggtcagctctggtgcggtcgccgccggggtgatcatcaggataccttcgtcttcgtagatgtcagacgcgggctgagtagaggaagagcacaggtgaccgataacgtatttgatcccgtcgttcaccactttgttcgcgaccgcgaccgcctgtttcgggtcacaggcatcatcatattttacgatctgcagtttttcgcccttgataccgcccttagcgttaatgtctgcaaccgcctgttctgcgccagtaaactcctggtcgccgtactgcgctaccggaccggacatggcgccaaccacagccactttgatgtctgcctgcgccatggtgctgaatgccaacgcgatacatcctgccagtaacgctttacccttcatgttcatcctgagattccccattattatggttattacgattgttgtgatgttgttgtgcagcgctttatttcagttataggtgtgctgttcgcgctttttcagcatactctgctaaaacataccccatttttatgattttggaatagcaaatttgaaatgaatatatgataagcccggcagagagttccgccgggcatgtggctttaacgtgtcagcgacgcggagataatgtccagcgctttacggaactgcacttcgggaatcgtcagcggatagaggaaacgaatgacgttgccgtagacgccgcagctcagaagcagcagaccttcctgcagtgcacgctcctgcacctggcgggtaaattccggcgaaggctgacccgtttgcggatcgttaaactccaccgccaccatcgagccctgcgcgcgaatatccgcgatatacgggcagtgttccttcgccttgttcaacacttccaccaggtgatggccaagatgcgccgatcgcgtgcagagatcctcttcgtcaatcacgtccagcacggcgtgcgccgccgcaatcgccagcgggttacccgcgtaggtaccgcccagcccacccggcgcaggcgcatccatcacttcagcacggcccgacaccgccgagagcggcatcccgcccgccaggcttttcgccatagtgatcagatcgggcttcacgcagtggtgttccatcgagaacagcttgccggtgcgggcgaaaccgctttgcacctcgtcggcaatcagcaaaatgccgtgggtatcgcacagggcgcgcagcgcctgcataaaatcagccggggcgatgttgaaaccgccctctccctgaaccggttcgagaataatcgccgcgacctggtcaggggcaatatccgctttaaagatacgttccagggttttcaacgcttccgccgtgctgacgccgtgcagctcattcggatactgggcgtgatacaccgagccggggaaaggtccaaagccgagcttgtacggcgcaactttgccggtcagcgccatggtcataaaggtgcggccgtggaacgcgccaccgaaggtgataaggccggggcgtttggtaaaggcgcgggcaattttcaccgcgttttcgaccgcctcagcccccgtcgagaagaacgcggttttggccgggccgtcaatcggcacgcgctggttgatgcgctcggcaagcgccacgtagccttcatacggcacaatctggtaggccgtgtgggtaaacgcgtggagttgtttttcgatggcggaaatgactttaggatggcgatggccggtattcagcaccgcgatcccggcggcgaagtcgatgtactcattgccttccacgtcccacaccgtggcgttttcggctttatcggcatagaagttacacatcacgccaatgccgcgcggcgtcgcctgtaaccgccggtcgttcagttcgttgtttttcaccctgtccccctgagaaagtcgcctgcttagcgcatcagtaagtgtttgccagggggagggaattcgccagagcgggcgctaaaaaaacaaaacccccagactctcatccaggggttctcggtgtacttcgcgttaattacgcttcgatagcggcgcgaagtttcttcatggcgttcttttcaagctgacggacacgttccgcagagacgccgtagcggtcggccagctcctgcagcgttgacttgttgtcttcgtccagccagcgggcgcggataatatcctggctacgttcgtcgaggccttccatcgcatagctcagcttgttcgcggcctgatcttcccagttgtcctcttcgatgccgtcggcaaagttagaggttttatcctgcagatacagaaccggtgccatcggctggctgtcagatgcgtcatcgtcggaagacatgtcaaaagtcatgtcctgcgcggccatacgggattccatctcacgcacgtctttgctggaaacgcccagctcgcgcgccaccatttccacttcatcctgattaaaccagcccagacgctgcttggttttacgcaggttgaagaacagtttgcgttgcgcttttgtcgtggcgactttcacgatacgccagttgcgcagcacgtattcatgaatttctgctttgatccagtgtacggcgaaggagacgagtcgcacacccacttccgggttaaagcgacgcacagccttcatcaggccgatgttaccttcctgaatcaagtccgcctgcggcaggccatagcccgcataattacgagcaatgtgaacaacaaagcgcaggtgagacaggatcagctttttcgctgcttccagatcgccctggtaatgcagcttttcagcaagctccttttcttcctcggccgttaacatcggccaggtgttcgcagcccggatgtaagattccaggttaccaacaggggctaaagctaaagtttgcatttctttggtcattcattcctctcagtgtttcttctggtccaggctgtccccgtcaggcaacaaccatgccaaagcgtttgagcaacgagattagcattcactcttttatcagacagtgattttatccacaagttccaggtgcaacagtgaataaattacgcacaaaatgtgacatggagatgataacaggggaagagacaacagggacactttccctgcagagcgaacatctcggtgcagggaaagattatatcacgcttttattagtcgggagtaaagtgacgtaaatgttgaacggttgccagccacgctgccacccacccaatcattgaacacaccagcagcagtaagagacactcatcgaaccctaagccgctgatatcaaacttggttccgaaaacctgcgccacttcagtcacggcagaggaaagccgcatcaccaaaatttctgacaatatcagtgaaagaaatgcgccggaaaaaccgagcagtgcgccaccgtaaaggaacggtcggaggatgaagccatccgtcgcaccaatcagtttctgcacgttgatggtatcgcgacgagcgaagatgctcaggcgtacgctgttgccaatgacgaggaagaccgccgccaccatcagcacgccaatcatcgccgcgacgcggcctaccagcccggtcagagcagcgagacgcgcaaaccagctgtcatccatgcgcacttcatcaatgcccttaatgcgtgtgatgcgatcgcgcagggtgttaagtgaatcggtcccctggaaatccagcttcgggatcaccaccgccacggcaggcagcgggttctcttcaagcatatccagcgcaccgccaaagcctgaccagttgcggaactcgcccagcgcgtcttcacgtgagagatagttgaccttctccacaccctgctcggcctgaatttgcccaaccacctgcgccgccgcgttatcgtcgagcgctttatccagatagaccgtgatctgcggagacggataatactgcgacgccgcctggttgacgttcttgtaaaccatgtagcagacgcttggcagcgtcagggagatggcgattaccatcaccgtcaggaacgtcgccagcggtttgcttttcaggtcctgcagcgcgccgtggaacgcgtagcgcacctgctcgttaaagacgttggttttgcgggaggccggttttggcgcggccttctggcgcttcggcgcattacgattgccgtcacccccgccctgcggcttacggaaacggtcaaaccggttcccgaactgccgaatctggtttattgcatcacgcttgttcaccgtggcctccgtgcaaatgcccgtcgctcagggtcagcatgcggtacgaacgacgggaaatcagcccgatgtcgtgcgttgccatcaatacggtaacccctacgcggttaaactcctcaaacagacgcaaaatcccttctgacagggcatcgtccaggttaccggtcggttcatccgccagcagcacggcaggcttgttcaccaccgcgcgggcgatgcccacgcgctgctgttctccgccggagagctggatcgggaagttcttcgctttgtccagtagcccgaccttatccagcgccgcagagacgcggcggcggatatcgtcatagctggcgccggcaataatcagcggaatggccacgttatcgaaaacggtgcgatccatcagcaggtggtgatcctggaaaatcatgccgatctgacgacgcaggaacggcacctcacggtttttcagacggctgatctcatggccgctgaaaaagatttttccggcgcttggccgctcgatcccacagataagcttgagcagggtacttttccccgcgccggaatggccggtcaggaatgccatctcgcccggctgcaggtggaaggtcaccccctgcagcgcttgtctcccaccgagataggccttgctgacgtgttcaaagcgaatcattgttagtcctctcgggcaaataatgcctcaataaagtcgtccgccttaaacggacgtaaatcctcaatacgctcgcccacaccgatgtaacggataggaatgccgaactggtcggccacggagaagatcaccccgcctttcgcggtgccgtccagtttggtcagcgtgatccccgtcagtcctaccgcttcatggaacagttttgcctggctgatggcgttttgtccggtgctggcatcaatggtcagcataatttcatgcggtgcgtcttcgtccagcttcttcatgacgcgaacgatcttcttcagctcttccatcagatgcgatttgttctgcaaacgccctgcggtatcggcaatcagcacgtccacgttgcgcgccttcgccgcctggatggcgtcaaagatcacggatgcggaatccgcgccggtatgctgagcaatcaccgggatgttgttgcgctggccccagacctgcagctgctcaaccgccgccgcacggaaggtatcgcccgccgccagcatcaccgatttgccctgctgctcgaactgacgcgccagcttgccgatggtggtggttttacccacgccgttcacgccgaccatcagaataacaaatggtgttttgccttcaatattaagcggttcgtcaacttttgcgagaatttcacccatctcgtctttcagcaggccgtacagcgcttcggcgtcacgcaattgcttgcggctcgccccttcggtcagattagtgatgatcttacgggtggtttccaccccaacgtccgcaatcagcagctgctcttccagctcttcaaacagatcgtcgtcgatcttcttgccgcggaacagactgataaatccggaacctaagttttctttggttttaagcaggctgcgcttcaggcgcgcgaagaaaccttctttggtcggtttttcctgctcctgaacgatctcttcttcggcctgctcttctaccggcacaacgatgaccgcttcttcagccgcttccgccgccagcgcctgggcttccagctcttcgtcggtcagctccggctcgagcgccgcttcttcttccaccgcctcaacgatttcaacggtttccgcttcggcctgccactcttcggcagacaccgcttcgtctttgacctcttccggcagcggaagctcttcgtgttcgatagcggcctgaggcgcttcgatagcggcttctacgacaaccggttctggcttctcgctctcctgaacctgttcagtgacctcaaccacctcttcagcaaaggtttcaacctcttctttgctgtgcgccgtttcttccgcatcgacaaccgcggcggtttctactggcgtttcaggctgcgatggctcttcaacggcttgttgctcttcggttttctgttctgtttcttgctctttttcaccgaagcccagccaggaaaagaagccacgttttttttgttttgccatctgcgactacactcctcgcggcgctatatacatggaagctaaaaaaatgatgaaatagtctaacactttacttaattgacatcaccgcccgcaatcgcaggccaattgttaacagagctttcctgagatgaagaaacccaaccgcgcctcggccggtcaaattcgtattatcggcggtcagtggcgaggccggaaattaccggtgccggacagccccggtttacgccccactaccgaccgcgtgcgcgagacgctgtttaactggctggccccgtcaatggtagacgcccgctgcctggactgcttcgccggtagcggcgcgctcgggctggaagcgctgtcgcgctatgctgccagcgccacgctgctggagatggagcgcggcgtggcgcagacgctgcagcaaaatctggcgacgctgaaagcgagcaacgcgaaagtggttaacaccaacacgctgagcttcctcgcgcaaaagggcacgccgcacaccgtggtgtttgtcgacccgccgttccgcaaggggctgctggaagagacgttatccctgctggagcaaaacggctggctggcggatgacgcattaatttacgtggaaagcgaagtggaaaacggtttgccgccggttcccgctcactgggatctgcaccgtgaaaaagtggcaggtcaggttgcttatcgtctgtatcaccgtcaggcacaaggaggatccgatgccggtactgattaatctgggacgtctgctgatgctgggcgtctgggcgtttttgctgctcaacctggtgcacccgttcccgcgcccgatgaatattttcgttaacgtggcgctgattttcacctcgttcatgcacgccctgcagatggtgatgctgaaaaacggtctgccgaaagacggcccgcagatgacgggctggcagcagctgcgcgtgtttattttcggcgtgtttgagctgctggtgtggatgaagaagtttaaggcgcaggtgaagaagtaaggtgcgtttagtcgcccggtggcgcttcgcttaccgggcctacgaaaccacgtaggccgggcaaacgcagtgccgcccggcgttacaactcaggaacaaacccctcaaaccgcgatcctttgtaactcagcgttcctttttcccccaccgtcagctggtggtactgctgcgcctccaggcggaaggtcatctccaggccgcccgtttccggcttaaagctcgcttcataacgcattgttgtgcccgcaggcgtcacctgctgctggcgcgagcggcggtcattgagcggcttttcgcgtttgttcgtcaccaccacgcgcttttgcatcagcggcgcggcatcgttatccgccttctcgcggcgctgctgcacgaagcggaacgaggcggcaatgacgataatcgccaccacgataatgaaaaacagcggcatcttgctcattcaactatcccatcagattatgcggaattcaggataccctgccttccccggcattgccaaacgcccgcccgcgtcactacactggatcagaaactgattattcagacttaacagatacagggagttaatatgctttggtcatttatcgctgtctgtttttccgcatggctttatgtcgatgcgtcgtaccgtggtcccacctggcagcgctggctgtttaaacccgtcacgctgttgctgctcctgctgctggcctggcaagcaccgatgtttaatgccgtcagctatctggtcctcgccgggctgtgcgcctctctgattggcgatgccttaaccctgctgccgcgccagcgcctgctgtatgccgtaggggcgtttttcctgtcgcatctgctgtataccatctacttcgccagccagatgacgctctctttcttctggccgctgccgctggtcctgctggtgattggtgccctgctgatcgcggtgatctggtcgcgtctggaagagatgcggttgccgatctgcacgtttatcgccatgacgctggtgatggtatggctggcaggtgaactgtggttcttccgtccgaccgctccggcgatgtccgcgttcttcggggccgcgctgctgctgattgggaatatcgtgtggctgggcagccactatcgccgccgtttccgggcggataacgcgattgccgccgcctgttactttgccgggcacttcctgattgtgcgttcgctgtatatctaaataacgcttgactctggagtcgactccagagtgtatgctgcggttaatgagaaaattatcattgccggagactgccatgtcgactccagaaacacccaaaaaagtccctcaattctcggcgcttaagctcagtcccgttccgtcgaaagatgactgctgctgcgaaggcgcgtgcgaaacgcaaactcaaacgcttcctgaaagcggcaaccgctacagctgggtcgttaacggcatggactgcgccgcctgcgcccgcaaagtggaaaatgcggtgaaacaggtgccgggcgtcagccacgttcaggtgctgttcgccaccgaaaagctgctggttagcgccgataacgacgtcagcaaacaggttgaagacgcggtaagcaaggcgggttacagcctgcgtagtgaagccgcgcccgcgaaaaaagcttcttcactgaaagaaaacctgccgctcattaccctgatcatcatgatggccctgagctgggggctggaacagatcaaccatccgttcggcaacctggcgtttatcgccaccacgctggtcgggctgttcccgattgcccgccaggcgctgcgtctgatgaaaagcggcagctggttcgccattgaaacgctgatgagcgtggcggccatcggcgcgctgtttattggcgcgacggcagaagcggcgatggtattgctgctgttcttaatcggtgaacgtcttgagggctgggcggcgagccgggcgcgtaaaggggtcagcgcgctgatggcgctgaagccggaaaccgccacgcgcgtagtaaacggcacgcgtgaaacggtcgccatcacgaccctgcgtccgggcgacgtgatagaagttgcggcaggcggacgcctgcctgccgacggcgcgctgcttaccgccaccgcgagctttgatgaaagtgccctgaccggtgagtccattccggttgaacgtgccgcaggtgaaaaagtgcctgctggcgccaccagcgtcgaccgtctggtgcagctcaccgtgctttccgagccgggtgacagcgctatcgaccgcatcctgaagctgattgaagaggccgaagagcgccgcgcgccggtcgaacgctttatcgaccgcttcagccgcatctacacgcccgccattatgctggttgccctgctggtcaccgtcgtcccaccgctgttctttggcgcgccgtgggaggggtggatttataaagggctgacgctattgctgatcggctgcccgtgcgcgctggtcatctccaccccggcggccattacctccgggctggcggctgcggcacgtcgcggggcgctgattaagggcggcgcggcgctggagcagctgagccaggtccagcatatcgccttcgataaaaccggtacgctgaccgtcggcaagccgcaggtgaccggcgtgtattcgcaggacatcagtgaagatgaactgctgaccctggccgccgccgttgagcagggctccactcacccgctggcgctggcgattgtgcgagaagcgcagtcgcgcgggctgaatatcccaccggcaaccgctcagcgggcgctggtaggctccgggattgaggccaccgttgacggtaaaaaagttctgattgtcgcggcgggcaagtcttctcatcctgaggtggaggcgttagaacagaccggacaaactgtcgtgaccgttatgcagaacggcgtcgcaaaagggatgctggcgctgcgcgacaccctgcgcgatgacgcaaaagaagccgtggcggcgctgcatcagctgggcgtgcagggcgtgattctcaccggcgataaccctcgcgcggcggcagcgattgccggtgagctggggctggcgtttaaagccggattactgccggcggataaggtcagcgcggtaacggagctgaacgcgcacgccccgctggcgatggtcggagacgggattaacgatgccccggcgatgaaggcgtccaccatcggcattgcgatgggcagcggcaccgacgtggcgctagagacggcggacgcggcgctgacccacaaccgcctgaccggactggcgcagatgatcgatcttgcgcgggcgacgcgtgccaacatccgccagaacatcggcatcgcgctggggctgaagggggttttcctggtgaccaccctgctcggcatgaccgggctttggctggcggtgctggcggataccggcgcgacggtgctggtgacggcgaacgcgctgcggctgctgcgtcgccggtaaaaaaacgcccggtggcgctgacgcttaccgggcctacatatcctgctaaaacgtaggccgggtaaggcgaagccgccacccggctttttttatatgaagtagctcatcgccagccctaaaaacagcaccagaccgacgtagttattgttcataaacgccttgaagcaggcgtcgcgttcgcgcttcgcaatcagcttttgctggtacgcaaacagcagccccgccaccagcaccgaccagtaaaacgcccagttcagcccgttcaggcggccaatcgccaccatcagcgccagcacggcgacctgcagaatcccgataatcagcttgtcctgacggccaaagaggatggcggtggatttgatgccaattttcaggtcatcgtcgcggtcaaccatcgcgtattgcgtgtcgtaagccacggcccaaagtatgttcgccaggaacatcagccagcagctgagcggtaaggactcactaactgccgcaaacgccattggaatcgaccagccaaacgctgcgcccagcaccacctgaggcaggtgggtatagcgcttcataaacggataaacccaggccagcgccagcgccgcaacggaaagcagtatggtcatggtgttcagggttaacaccagcaggaaagagagcagcaccagaacagcaaacagcacgcgggcttcttttccggtcacctgcccgctgggtaacggacgaccggcagtccgctttacatggccgtcgaatttacgatcggcataatcattgaccacgcagcccgctgcgcgcatcagccagacgccagcaacaaacacgccgaggatccacagcggcggcacgcccggcgtggcgacccacagcgcccataaggtcggccacagcagcagtaacgcgccaatcggtttatcggtacgcattaagcggtgatacgccaacagcttattctgcgtcaggctccactccattttttcttcctcttagtacaacggtgatgccggtaaaaaaagctccgtcagaattaacggtttaccgctcaggcgaaggcgggaacgacgcccccacagttcggcatcacgaccaatttcaataaaatcccgggtaagctcagacgaggtgaaaaggtaacgccccagcggcgttttccccagacgctgcagcgccagctcggacccggacaaagtggactcgggcaccaccgtccgtccggcaagccacggctcgccgtcagcgcagagtaaaatttcacgtagccagtaacgtggctcgtgcggcagcagcggcagctcgttggcgatctcatcgccggagacaaacccttcctgaatcagggtcaccgtgaccgtttttccctgctgctcaaaacgttttgtcatggaatcttccagcaacagccagtccagctgctgcggatcaagcgcaggtatttggtcgaaatagcgcagcgcacgcagttgcgttagcgcagggtgtgacatgccagactctccgatacataacgtacaggcattgtatcgcagaaacgcggattgaggggggccaaacgttatttaacgatcacgatcgcaacaagagtgcaacagcccggcggagacgaaaaaaagtgcgcccactcaggcgcaccaaacgactaacaaatcagcattgtggggaaacggttaccccttgccttttacactgctgataaaggtggaacgggcagtggttgaacctaaacgttcggcttcatcaagcagcttcagcgctttatcgacatcgccgcgcttcaccgcctgcttgatggcattgttgaagtattcttcggtgtcgttcagtaccggctccgctttcttcgccggggccggcgctgcggtcgctaccggtgcggctgccgtggcagctggcgcggtataggcaggcgcagcggtgttgcccacggtgacagggccggtaccggaggagccaaacagcgggccgaccaggacgctggacgcactgctggtcgacactttcagcttcacaagaccgtcagtggtgtggcgggcgatcggatccgggatatccggtgcggcgttacctacgcctttggcataggccttcgcaggatcaagcagcgtggtggtttgctgcaaatctttttccgtggtgaagacgagtacataaattttctgctgacccagcgcaggcgtcaggcgcattaccccttccaggcgatcggcgctcatgacacccggttcctgataggtaaaatattcgctcgggaagaacgcagaaggcgtcatgttctggtcaagaatcagcacgttcggcgcaaagacgctggtctgtttattgacttcactggagagcgttaacgtcagttcgccaatgttagcgggcacgctgtacgcgaccactggaccactaatacccggaacattaagcggttgcccacccgtcgagagctgggtcgtttgggctttagattgatcgacaggcgtccagaccagctgttgcaacgcagctgccggaatggccggcgcggatgttgtgttttgcggaacgaaattcacattagcgagcgttacagcaggcgcgctcgccagcaaccctgcggataaacaaagggcaaggagagttttgttcattttcattgttatcacctcaaaatgcacaggtcagcggtagccaggcaatagcgcgccgtcccaaggattgaggggcttgcgcccctcagtttggtcattacgtcagattaagacgggattaccaccagatttccatctgggcgccgaaggaccactcatcgttgtcaccacggctgtaggttgtggctttggtatcgctttttgcaatgccgttgtcataaccccatttctcatcccacttcgcgtaagttgcgaagacacggatcgctggacgggaccagatgctgttaccggcctgccattgctgtgcaagggtaattttgtactggttgttggtatcgtcagttttctgcgacttaacgttgtcgtagccaacttcaagcaaggtgctcatgattggcgtccatttatacattgggcgcacacccacggtgtaccaggtcgtaccgttgttgtcgtcacgatcgatatcctgatacataccgacgtacatcagatcccagctgtcacccagagagatcgcaccgtggtcgagaatacgaaccagggaaccgttgttgttaatcttgttatttacaacaccaatttcagcgtctttgtcatagttgttgccggtgaaggaaccctgcggaatacctttgccctgagtggtcattgcatcggtagcgtactggacaacaaacttgttgtagcctttcagcatgctctgggtatgttcagcggtgaacatccagccatctttagatgcgccgtcagcgaagctgtaaccgtcagttttgttagctcggccatagtcaacacccaactccagcgtgccgcccgggttgatttccatctgcgccaagcgcacatcgaagacgtcgttagcggtgtctttgaagtcatgatagatatcgttgctggtgaagatgtatgagccgcctgcttcctgagaacgggtcgctgccagagacagtttaccgaagcccagatcgacgttttcgataccggcaccaggacctgaaatatcccagtagtagaagtcgatcatgtgaacgtcatgacgctgatagaagcgcttaccggcccagatggtggaacctggcagccactcaatcaggtttttaccctgcacgttggcttcacggaacgccgggtcggtagcttcccagtcgttctgttgagccacggagtacgctacgttggtgtcgaagtagaagctcttgtcgccttctttccacacttcctggcccagcttcagttccgcataggtttcacattcgttacccagacggtatttactttgggcaccggttgcctggaagcactgctgttcgccgccactacccgtccagccgataccggaacgagcataaccatggaaatccacggccagtgcctgagcagacattacgcccgctgcgacggcaactgccagaggaagtttgcgcagagtaatcatcattctatctcctgagatcattgcttttctttgaacacttcacctgtcggtttcgtgtcttcttttgggattgcttaaacgcctggctctttgtgcaaccgacgacatgcggtgccatcctcacggaacagatggcagcgctctggcggcaagccgatagcgaatgtggcaccctcttctaccaacaccacgtcattctggcggtagaccaggttctgacggatggcggggatctggatatgaatctgtgtttcgtgaccaagctgttcgacgacctgaacctcaccttccagcgtcacatcggcaatgtggctcggcagtaaatgctcaggacgaataccgagggacatgtttgcccccacctgtacgttggcgctgtcaaccggtagccagacctgctggcggtttggcagctccacctgtacctgttcaatggctgtcgcggtcactttgacgggcaggaagttcatctttggcgagccaatgaagcccgcaacaaagcggtctgccgggtagtgatacagctccagcggtttgcccacctgcgccacgcgaccggcatccagcaccacgattttgtcggcgagggtcatcgcttcgacctgatcgtgggtgacgtaaatcatcgtgcggccaagacgcttgtgcagacgggagatttcgatacgcatctggacgcgcagggcggcatccaggttggaaagcggttcatcgagcaggaagacgcgcggctcggcgaccagggtacggccaatcgccacacgctgacgctgaccgccggaaagcgctttcggtttacgctccagcaggtgcgccagctgtaatacttccgccacctgcgtcacgcgctggttaatcacctctttcttcgcgccggccagcttcagaccaaaggacatgttctcggcgacggaaagatggggatagagtgcataagactggaacaccatgcctacgccacgttcggcaggcgggatgtcattcattcgggtatcaccgatcagcaggtcgccgctggtgatggtttcaagaccggcaatcatacgcagcagggttgatttaccgcagcctgatgggccgacaaataccacgaattcaccttcgtggatgtccagattgatgtctttcgacaccacaacgtcaccccaggctttcgttacattacgcagctgtacgctcgccatgcccttctcccttcgttacaacctgtcaccgacagaaacattcaagataaggtgactatgggggatccattactttcacgaatcctccaccccccggcttttttatgggggaggaggcgggaggatgagagagcaggctctgcgaccggcgtgggcgggctgaggcaaaattcgtgaagccgcctgcaaaattcagtgcgtttttatgtgcgccagcactcataacttaaatttatgcaacggagatcacacaaatggggggtggggcgtaggggttgggaggatggaaagaggatgtcaaataaggagactgagtcacgttgaaccactgaagtcataccacgagacatcaccaaaaaggatggcagatatgaatatcaagactggcgcacgcgttttcgcattgtccgcccttgcagcaatgatgatttccgcaccggcgctcgccaaaattgaagaaggcaagctggttatctggattaacggcgacaagggctataacggcctggccgaagtgggcaaaaaattcgagaaagacaccggcatcaaagtgaccgtagagcacccggacaaactggaagagaaattcccgcaggttgcggcaaccggcgacggcccggacatcatcttctgggcgcatgaccgttttggcggttacgcacagtctggcctgctggctgaagtcaccccggacaaagctttccaggacaaactgttccccttcacctgggacgccgttcgctataacggcaagctgatcgcttaccctgtcgcggttgaagccctgtctctgatttacaacaaagacctggtccctaacccaccgaaaacctgggaagagatcccgaaactggataaagagctgaaggcgaaaggtaaatctgccctgatgttcaacctgcaagagccgtatttcacctggccgctgattgctgccgacggcggttacgcgttcaagtttgaaaacggcaaatacgacgtgaaagacgtgggcgtcgacagcgcgggcgcgaaagcgggcctgaccttcctggtcgacctgatcaagaacaaacacatgaacgcggataccgattactccatcgcggaagcggcgttcaacaaaggcgaaaccgcgatgaccatcaacggtccgtgggcctggaccaacatcgacaagagcaaagtcaattacggcgtgacgctgctgccaaccttcaaaggcaagccgtctaaaccgttcgttggcgtgctgagcgcaggcatcaacgccgccagcccgaacaaagagctggcgaaagagttcctggaaaactacctgctgaccgatcagggtctggatgaagtgaacaaggacaaaccgctgggtgccgttgcgctgaaatccttccaggatcagctggcgaaagacccacgtatcgcggccaccatggataacgcccagaaaggcgaaatcatgccgaacatcccacagatggccgcattctggtacgccacccgtaccgcggttatcaacgctgcaagcggtcgtcagactgtcgatgccgcgctgaaagatgctcagggtcgtattactaagtaagtctgaaaaacggcgggtagcgcgtgcgcttacccgccctacgactacggcacgatccgtaggtcaggtaagcgcagcgccacctgacgataagattccaccgttgtagaggaagaaccccatggatgtcattaaaaagaaacgctggtggcaaagcgacgcgctgaaatggtcagcgatcggtctgctgtgtctgctggtgggttaccttgttgttttaatgtacgtacaaggggaatatctgttcgccatcatgacgctgattttaagctctgctggcctgtatattttcgccaaccgtaaagcctatgcctggcgctatgtctacccgggcgtggccgggatggggctgtttgtcctgttcccgttgatttgtaccgtcgccattgcgtttaccaactacagcagcaccaaccagcttgcgcaggaacgcgcgcagcaggtcctgctggaccgctcataccaggcaggcaagacctttaacttcggcctgtatcccgcaggcaacgaatggaagttagcgcttactgacgaagcaagcgggaaatactatgtctctgacgccttcaaatttggcggcgagcagaagctggccttaaaagaggcccaggccctgccggaaggtgaacgtgccaacctgcgcgtcattacccagaaccgtcaggcgctgacccagctcaccgccgtgctgccagacgacagcaaagtgatcatgagctcgctgcgccagttctccggcacccaaccgctctataccctggcggatgacggcacgctgaccaacaaccagagcggcgtgaagtaccgtccgaataacgacattggtttctatcagtccattactgccgacggcaaatggggtgatgataaactcagcccgggctataccgtcaccatcggctgggacaactttacccgcgtatttaccgacgaaggcattcagaaaccgttcttcgccatcttcgtctggacggtggtcttctccgtactgaccgtgatcctcaccgtggccgtgggcatggtgctggcctgtcttgtccagtgggaatccctgaagggcaaagcgatttaccgcgtgctgctgattctgccgtatgccgtaccgtcgtttatctcgattctgattttcaaagggctgtttaaccagagcttcggtgaaatcaacatgatgctgagcgcgctgtttggcatcaaaccggcctggttcagcgacccgaccaccgcccgctcgatgatcatcatcgtgaacacctggctgggctatccgtacatgatgatcctgtgcatggggctgctgaaggccatcccggatgacctgtacgaagcttcggcgatggacggcgcgggtccgttccagaacttctttaagattacgctgccgctgctcatcaagccgctcaccccgctgatgattgccagcttcgcctttaactttaacaacttcgtgctgattcagctgttgaccaacggcggcccggaccgtcttggcaccaccacgccggcaggctataccgatctgctcgtgagctacacctaccgtattgccttcgaaggcggcggcggtcaggacttcggtctggcggcagcgattgccaccctgatcttcctgctggtgggcgccctggcgattgtgaacctgaaagccacacgtatgaaatttgactaaggagggcactgaacatggctatggtacaacccaaatctcagaaactgcgcctcctggcgacgcacctgggcctgctgatttttatcgcggcgatcatgttcccgctgctgatggttatcgccatctccctgcgttcgggtaacttcgccaccgggagcctgatcccggacgaaatctcctgggagcactggaagctcgcgctgggcttcagcgtggaacacgcggatggccgcgtcacgccgccgccgttcccggtgctgctgtggctgtggaactcggtgaaaatcgcaggtattaccgccattggtatcgtggcgctgtccaccacctgcgcttacgcctttgcccgtatgcgtttcccgggcaaagcgacgctgctgaaagggatgctgattttccagatgttcccggcggtgctgtcgctggtggcgttatatgccctgtttgaccgcctgggccagtacattccgtttatcggcctgaacacccacagtggcgtgatcttcgcctaccttggcggtatcgcactgcatgtgtggaccattaagggctatttcgaaaccatcgacggctcgctggaagaagcggccgcgctggatggggctaccccgtggcaggcattccgcctggtgctgttgccgctgtcggtgccgattctggcggtagtgtttatcctgtcgtttatcgctgcgatcaccgaagtaccggttgcctcactgttactgcgtgatgtgaacagctacaccctggccgtagggatgcagcaatacctcaacccgcaaaactacctgtggggcgactttgccgcggcggccgtactctctgccatcccgattaccgtggtgttcctgctggcgcagcgctggctggtgaacggcctgacggcgggcggtgtgaaaggttaagtttcattttgttatgccactgcaaccctcaactttagacgtattgtattgacccaacttgtgactgttgttaggcggcctccgggccgccatttttttattcgcgtttcagccgcttcgagttacacagccagagggtgatcaccagcagcaggatcgccgccgagtagatcagcacatcgagcggggatttatgatcgacgatgatcagccgcacaatcgcggtgatcccaatgtagacaaaataacgcagcgggaagtgaaagccggactgaaaatacttcacaatcagggcgataaattcaaagtagagaaagtagaccaccaggccttccaccagcgcatatttgctggtttgttcaggggcgaacagcacatccgccagatgcaccgtctccttacccaaaaagacgaccaggatcaggccaaggctcagcagaccgaggttcagcacggtctggaggacagttgagataaactcaacgcgcgggcgagtcagggatgtcatacagcacctcattctccagggcgaggtttctgtataacgcaaaaatgtgacggggatctatattttttgtttatgtttggcgcattcgcccggtggcgctgcgcttaccgggcctacaaaaaccgtaggccgggcaaacgcagtgccgcccggcgtgaagcatcagcggaagttaatgttcttatcgctcgtcatgtcgtacagctggaacttacgtccaagctgttgaccgccgtcacgcgtcagcggcgtccagccgatggccgcgcggctacgggttggaccggatgagaacagatccagcggaatcgacacgtaaacccctttggtgaagtccccttccccatattcgtccggcgagacgttggtaatggtggcgtagccgcccaccacgacgccgctgtcgaagtgtttggagatatccagcgtgccgcccttatcgcccgccaggtactggccgacgctggctttcaccagcacgtcaggcgcgaacgacggcgtccagtaggcggtcaggtgaccggttttaacgctgtagtcggtgaacttcatcatgtcctgggcgctgcgccagtcacgctgtttgacgtagttggcatcaatcccgaacgcccagttgctgtcgacaggacgataaagcacttctgcccccgcaccgccgtacatggtttccagatacccgccgtacacctgaccgtagaagccgttaccgaagtactggaagtagttggcctgcaggttgttcacgtaggcatcgttctgtacgtactcacgcacgcgggtacgcacgcgcggcagcgtcgagtcttttggcgggttggtgtagttgaacttgtcgtagttgttggcgatgttgccgaacaggctgccggtggtcagcaggtggtcggtcagccacagatccgccgtcgccatgacgcccagctgatacatgtagaagttttccggcccgccgacggactggtttaacaccggatcgatatggaaatcgaagcgcgacttgtcgatataccagccctgctcggtggtctccggcacgatcggctcaacgcgcttttgcaccagctcggtttcatgtccgagcggttcgccttccagatggcgcttcaggctggcaacgtccgtttccgtcgtcacctgcggcaggttgagacggttctccgtcacgcggatcgtacggatcccgtccgggagatcgttcatgatgatccggttggcgcgctcgatcccttcccgcgagtcgcggtattttacctgctcgccggtgacgtacagcgtatcgcctttcacctgaatttttggatccgccaggccggcattgtatttcagcagcgtcagctggtttgccaccacggagtgctgcagaatcgcatcctgcggctccggctggtatgcaggccgcgcgttgtcgttgtagtgcggccgcatgtcgttgaagttggtacgcagcgtaaagccaaacatcaccgtattgccgcgctcgtagctgaggttaacttcggcccaatcggtgacgcgataaatggcgccgacgttaaacttgctcttctgctcaatcttcccggcgaagtcctgcgagtagtcattcccctcgtactccagcttcaggcgcaatggctgccagggcgtctgatactccacgccgccaaacagcgaggccgggccgtggaacatctggtcgccgttgatggagcccgctttctgataactgttatcgcggtagcagtatttatcgctgtaggagcaaaacgggtttttcacgttgccgctggtgccgagatagccccatcccagaccgagcgagaagtcgaacggcccccaggccttgctggccacgatgtattccgcatcaaacaggccggtaccgccaatatctttggcgcccacggagacctgcggcatccagtagctctcttcccacaggcgaagcttgacgtcgaaggctttatctttgtaggtctgatcgcctgagaacgcctcgacgctgctgtattgtttcgtacggacgtcggtatagcgcagcgtggtttcaagccacgggaacagctgcaccgacgccgagtagtaacgatactggtcgttatcacggtagttaaggctaatttccccttcgcgcgccatacgcgcggtgggcgtttgcagtaaaccgacgccgccgaagtctgactgagacgggccaatgggtgccggatacgtttctgcatggcaggcggcactcacgcagagcgccagcatgctgtagagataggttcttttcattattccggtatccgctgaatcagggagtgaaggatatcggcgttaagcccgtcatacgccttcgtccagaaatggtcggcaaaaccgacaaaaataatgctgcccggcatgggttcgatatgtcgtttattccagtaagcaacgggcgctttttgcgtgtggccgtcagggtaaaccacccaggcgtagctgttatccgcaccgctcagcagactctgctcgtcgaggtagctcgccacgtcgcggccgggagtaaagggcttgttacccgggctgccgatcagccccatcacggtcaccgtcgtcggcttcgccggaagccagagcgtatagtccccttccagggtcgggttgccgttttccgtgacacgcacgtcatccgggtcaagattgacgttctgtcggcccgtcaccttcagcgcctgcagctgctgacggacgctgttaatggccgccgcgtcgtcgccgtcttcctgttccgcgagtcccgttagcctggcaagaagcgccttgtgctgctgttccgcttccacggtcttctgccgttcagcgatgaccgcgcctggccaccagctgttggcaagccttggctgtccgacgagatcgagcagacgttcggcgtgggttaaggttttaggtttttcactgtccggcgtgtagacctttaccgttcccgcggaccatgccagcggcgcggcaaaactggcgataagcgcagcgtggatgagcgttttcatgatttcgccgccttgatcagggtggttttgaccgggaagaatccggcaccgagatactgtaaggactggcggatctgcccttcctcgtcgatccagaagcggttatgccaggtggcctggtcggtggtgacctcttcatccagcacgcgaacctgcgtttcgtcgctgccgaccttcacgctgtcggtgccgtcccagcggaaggtcgagcgtgccgtggcataacgcacctgcttgtgttcggtccagcccatcgtgcgcgtccagcccgcgccgtcggcgatctggttcggcttgatcagcggatcgtcagcgagattattcacctccagcaggttatcgccgcccaagagggttttcacgatacgaccatgctgcgtcacgatggtggcctgatcctgcgtcacccatttctgctgcccgttttcatcgaaagcgagcaccacaaacagttgcgggccatcgttaagctgcatgtactgactggcataaggcatgttctgaagctcgtcatcggtcagatgcacgcccggtgtgccgaacaggctttcccacagcgagtttcccagccctttagtggtggccgagcatgcctgcagcagcaggcaaatcagaatgattgctggtcgcttcacgactcttctccgaaggggcgaaataaccacaccgaagtgtggttatgattaaaacacccgctattactgggtgctggttgtcgtggtggtcgtggttccggtgttggagccatcaccgccaccggttgccgccagcgcgacacccacggctgaacttacggtgctggcgctggctgcggtagaacttcccgcagacgcagacgtcgcagccgaccctgccgcttccccgacctgaaccggagctgcataaacagatgtcgccgcaagcgcagatatggcaaaaatgccatacagtactttcttcataacaatttcccttcaatgaatgaatggagatttgcccgaaaagaatttcaggcggaatcgagtatacacaactcatgccgtgggtttgccgtaaggggaaatagagggtgggttttcagactaatggataaaatcgaaatgaaagacaaagataaaaaatattaaataaatataaaacaatagcttataatattgaaatattaagttccttctgcgtattttcttaaaataaaccgcagcaattaacgggttaaacgtctttttcagattaaactcagaaccagaatttgcgttaactaacagacatcaggaattatctgataaaaaaatgccggcattaagccggcacgttttcatggcgttttaattacgcacgccatgctttataacgattgatcaacccattggtcgagctgtcatggctggtaatcgcgttatcgtcacccagctcaggcagaatacggtttgccagctgtttacccagctcaacgccccactggtcaaaggtgaagatgttcaggatcgcgccctgcgtgaagattttgtgctcgtacagggcaatcagcgcgccaaggctgaacggcgtgatttcgcgcagcaggatggagttggttggacggttaccttcgaacactttgaacggcaccacgtgctccagcgttgccggatctttaccctggtcgcggtattcctgctcaaccacctcgcgggatttaccgaacgccagcgcttcggtctgggcgaagaagttggacagcagcttcggatggtggtcggacagcggattatgggtgatagccggggcgatgaaatcgcacggtaccattttggtgccctggtgaatcagctgatagaacgcgtgctgaccgttagtgcccggctcgccccagatgattgggccagtctggtaatccaccgcgttgccgttacggtccacgtatttaccgttggattccatgttgccctgctggaagtaagccgcaaagcggtgcatgtactggtcatacggcaggatcgcttcggtttcagcgccaaagaagttgttgtaccagataccgatcagcgccagcagcaccggcaggtttttctctggtgcggtggtggagaagtgtttgtccatcgcgtgcgcgccggagagcagctcaacgaagttgtcgaagcccacggacaggatgatagacagaccgattgcagaccacagagagtagcggccaccgacccagtcccagaattcgaacatgttcgcggtgtcgataccgaactcgctgacggctttaccgttggtggacagcgcagcgaagtgtttcgccacgtgcttgttgtcgcccgcggttttcaggaaccagtcgcgcgcgctgtgggcgttggtcatggtttcctgagtggtaaaggttttagacgcaaccaggaacagggtggtttccgggtttacgttcttcagcacttcggcgatgtgggtaccatcgacgttagacacaaagtgcatattgaggtggtttttgtacgggcgcagcgcttcggtcaccatgaacgggccgaggtcagaaccgccgataccgatgttaaccacgtcggtgatcgctttgccggtgtagcctttccagcttccggagatgatcgcttcggagaaggttttcatcttttccagcaccgcgttcacttccggcatgacgtctttgccgtcaacgatgattggggtattgctacggttacgcagggctacgtgcagcacggcacggtcttcggtgcggttgatcttctcaccggagaacatggatttgatggcgtccgccagctcggtctctttcgccagatcctgcagttttgccagcgtctcttcggtaatgcggtttttagagaaatccaccagcatcaggtcgtcgaaggtcgcggagaacttgctgaaacgatcggcatctttcgcgaacaggtccgcgatggtgacgtctttcatttcatcaaaatgtttctggagtgcctgccaggcagcggtctgcgttgggttgatgtttttcattagcaatactcttctgatttgagaattgtgactgcggtcgattgtagcgcctgcaaataaaaattgtgatggtttttatgccattgccctggcctgcatcaaacacaggtgaaaagacccgaaaagtatagctgctgaagcgccctcctggagcggagaaatgtcggtcaaaatgccctaaaacgaagcataaaatctggccctgttataagtcctgtttctcaggggtacccccccataaaaaatccgcataatcccagcattgacaggacctcccccacattttatttatagggccgtattttgcgcctgcacctgttttcgtttcattcttgtgccatggtcgcttattcattccctgacacgaggttgttatgacgagttttgtggtcgccaagtttggcggcaccagtgtggccgattacgatgccatgaaccgcagcgccgatgtggtgctggccgatccgaatacccgcctggtggtgctgtctgcatccgccggcgtgacgaacctgctggtttctctgtctgaaggactggaagcgacagaacgtttcgtaaagctggatgcactgcgcaaaattcagttcgacatccttgagcgtctgcagaacccgaacgtcatccgcgaggaagtggaacgcctgttggaaaacatcaccacgctggcagaagccgcctcgctggccacctccaccgccctgaccgatgagctggtcagccacggtgagctgatgtccaccctgctgtttgttgaaatcatgcgcgagcgtaacgttcaggcgcagtggtttgacgtacgcaaaatcatgcgtaccagcgaccgctttggccgcgccgagccggacgttgaagcgctggccgagctgaccaatcagcagctggccccgcgcctggcagacggcatcgtgatcactcagggctttatcggtagcgaagcaaaaggccgcaccaccacgcttggccgtggcggcagcgactataccgccgcgctgctgggcgaggccctgcatgctacgcgcgtcgatatctggactgacgttccgggcatttacaccaccgacccgcgcgttgtttccgcggcgaaacgtattgatgtgatcgcgtttgaagaagcggcggaaatggccaccttcggcgcgaaagtgctgcacccggccacgctgctgcctgctgtgcgcagcgatattccggtcttcgtcggctccagtaaagatccaaaagcgggcggcacgctggtctgcaagaaaacggaaaacccgccgctgttccgcgccctggccctgcgccgtcgccagacgctggtgacgctccacagccacaatatgctgcactcccgcggtttcctggcggaagtgtttggtattctggcacgccacaacatctccgtcgatctgatcaccacctctgaagtgagcattgcgctgacgctggacaccaccggctccacatcaaccggcgataccctgctgacgcagtcgctgctgattgagctgtccgagctgtgccgtgtggaagtggaagaagacctggcgctggttgctatcatcggcaacaagctgtcgcgcgcctgcggcgtgggcaaagaggtgtttggcgtgctcgacccgttcaacatccgcatgatttgctacggtgcgtccagctataacctctgcttcctggtgccagccgatcaggccgagcaggtggtgcagaaacttcatcagaatttgtttgaataaacgcaagaatggcccgggcgttttcaccaccgggccattctttagcttttcattactgttctcatcagcagcgaatccagatcttttaaatttccttctctgctgtcgggtagtaccggcggcacttctcctctcaccagctcattttgcaaaaaagcgtggaggaagggccgtttaggaccatattccgcttcacctgcgcgctgttttatttccagcaatgcatcgatttccgcacgtaacggcgcacacagttcgctcccggcaagcagttcggcaaaacgcatcggtggaacgcctttccccgcttctacccaccgcgccgccagcaaaggtcgcagaacataaaagtactttttcagccgaaccgtttccccctgtaaatatccacggaagttttttcgggccatcgagtagtaatgccagcgggcgcgcaatggcgaaaaccacgcaggtattagcgcgcgcaactcggccactaccgtctcatcctcctgataaacaacaggggaatccagccactcgataagcgtcgggtttgcccccttcagcaggcccagtgccttgcgccattcccagccacaaacgtccagttcatcatctatcggcagctcgatcacatcctgttgggcttcgacgcgcagataccattctgggcggtgaacgtacaaaaaccgcacatcataatcgctatccggtgaggcaaatccccatccccggctgcccgattcacaggcgtagagcacgcgcacgttatagcgctgctctatatcgcgaagttgcgcgcagacacgtgcgcacatcgcgctatcaacatcgttattgctcattttttatccttttacacacactacctgacgcagggtgtgaacgatctccaccagcgacgattgcgcggccatcacggcatcaatgtctttataggccatcggcgtttcatcgatcacctcattgtctttgcgacactctacgtgagaggtcgcctgaatatggtcgctaagggtatagcgtttttttgccgccgttcggctcatcactcgcccggcaccgtggctgcaggaacagaagctttgctcgttgccgaggccacgcacgatgaagctctttgcgcccattgagcccggaataatccccatctgccctttctgcgccgacaccgcacctttacgcgtgatcagtacctcttccccaaagtgatgctctttctgcacatagttgtgatggcagttaaccgcctcctgctgcgtaataaagggctttgtcacttcgcgagagagcgccgccagcacgcgcgacatcatcacttcccgattgtggcgggcaaaatcctgcgcccactccaccgcctcgatgtagtcctcataatgacgactcccctcctgaaaataggccagatttttatctggcagatgtcccaggtgatgctgcatatcctgctgtgccaggacgataaacacattaccgatggcgtttcctacgccgcgcgagccgctgtgcaacatcacccagacgcgctgctgctcatcgaggcaaatttcaataaagtggtttccggtacccagcgtgcccagatgctggtagttgttggttttcagcaactgcgggtatttatccgtgagttgtttaaaacgtggggccagcacccaccagcgatcgtccacttctttcggtggcgtttcccacgcgcctttatcccgtcgagaacgggtattggttctcccatgcggtactgcctgttcaatggcgctacgtaaaccgctgagattatccggcaaatcacccgccaccagcgacgtgcgaacggcaatcatcccgcagccaatatccacgccaaccgccgcaggaataattgcccctttggtcgggatcacgctgccgatggttgagcctttaccgagatgaacgtcgggcatcaccgcaaggtgtttgaaaataaacggcatctttgcggtattcagtaactgcgcctgtgcctctggctccacgggaacgccgtgagtccacattttgatcggggcgccgtttgacgccgtcagtaattcaaaatcattctgttgcattgcgttatcctttcaggttaacaaggccgtgtaatacctggtccaggccaccaaatactgaaattttgtcgatacgctccgcgaccctttccagggtttccagctcttttaaacgcagcgccaccgggttgttctccatcacctttgcagtgtttaacagcgatcgtgtcgccgccgtttcttcacgtcggcgaataacattcgcctgggccgatttttcggcctctaccagacgggataaaatcgttttcatatcaccaggtaaaacaatatcttttaccccaagcgacgcaatttccattccaaaagatgacaggcggccttgcacctgtttgctgaccacctcatcaatgatctgcttatcttccagtaactcatcgagcgtgcgggtgccgaccgcctcacgcagtgcgaactggagttcgcggtacaaatgttccagcggtttcgtaagctgtccgcaggcctgcagcacgtcgctgtagcgccagttagccgccaggttcaggcgcaggttaactttgtccttcgtcaggatctcctgcccgctcacctccaccacctgaaggcgcgtatccacgacctctgcctcaaccagatggttaattttccagtaggccgtcagtcccggcggtaacagtgcctgaatttctccgtcgattttcaccaccccgacgtgccaggcaggtacctgtacgaccagcatcgcgtcgcgcccctttagcgcgccattacgacgcggttgcagagcagcattcatcacgtccaccggcacccgcacgtcgcgggtatcgattctttgcagggtcaacgccgcatcctgctgccagtacagacgacgagtcgaaggcggcacaatttcctgcaatacgccgttgttcgataacaccccgatttcatccgcagtaaggtcaaccgccaggcagtaacgtaccacccagtcaggctgaaagcggcgcagataatccgccagcgcacccggcacctcgctgccgtcctggctcaccaccagcacgtcgtcagtattgaaccaacccagacggtgttcacccgcctccagtacccggtaataatcgccagcttttgctaccagccctaactgacctttttttatcgtgatttttttagccattttatattccttaaagtcaggcgcgggtgcaggcacgaaatcacaggggaatgccttttcgcctgcgatccggcgccattaccggcgaccttcattgggattgctgactgcgcaatccccgtttttactttgatgtttacaaccagttttcattgggagaatgaatcgggaatcgaacccttctgtctgtcatgggttgacggaacgcccccggaaaacagccttgccgttcctggtgcgccgacggggccttaacccccagtgtgctcaacgtcgtgacgttatctgtattgccagaagcgtgccaaaaataaaaatcgccgttttatttttttattttattgataattaatgctttttatttatcacgtttttcatgcattgccgttcggctcaacatttcttatcctgatatatcgacaattatctttctggataaacatgaagaagcggaaggtggtgatcggggtgcttggcaccgtgatggataaacggggaaagcgggctaatcgctttcgcaaatggcgaccgaccgtcgggctatgccaacagccggatttcccggtcgacaggctggagctgctacatcaaccgcgagatctcggcatggctcagcaactggcggaagatattgtgctggtttccccccacaccgaggtgcgtcccagcacggtaatcattgaagacccgtgggatttcgaagaggtttatgccgcgtttctcgatttcgccacccagtacacttttgataccgatcgcgaagagtatttcgtccacatcaccaccggcacgcatgtggcgcagatctgttggttcctgctgacggaagcccgctatcttcccgccagccttttgcagactggccctgccagaaaagaagcctctgctgaggagactgcagccggaacttactcaattatcgacctggatttaagccgctacacgacccttaccaaccgttttcagcgcgagcagcagcagtcaatctcatttctgaaagcgggcattgagacgcgaaacgccacctttaacagtctgatcgacaagattgaacgcgtggcgctacgttctacagccccgatcctgctgaccggccccaccggcgcgggcaagtcgttcctcgcgaaccgcatttatcagcttaagcagtcacgccatcaggtttccggcaaactggtttccgtcaactgcgcgaccctgcgcggtgataacgccatgtccacgctgttcggccatgtgaaaggagcctttaccggcgcactgtcggcgcgcagcggcctgctgcgtgaagccgatggcggcgtccttttcctcgacgagattgccgaactaggcctggatgaacaggcgatgctgctcaaagccattgaagagaaaacttttttcccgtttggctccgataaagaagttcacagcgattttcaacttatcgccggaacccaccgtgatatgcgccagtgggtggcagaaggacgttttcgtgaagatctctatgcccgtattaatatgtggagctttgccttacccggccttgcccaacggaaagaagacatcacgccgaatgttgactacgaacttcaacgtttctctcgcgaaagccagacgcaaatccgcttcgataaagaggcacgcgaaggctatctggcctttgcctgttccagcagagcgctgtggcggggcaactttcgcgaactgagcgccagcgtcgcacgcatggcgacgctggcggaacgagggcgtattactcaggatctggtgctggaggagatctcacgtcttcagaccgactggcaaactgacgtgacgcagcctgcaactgacatggagattgacctctttgaccagcggcaacttgaaacggtgctggaggtatgtcgccgcagcgcatcgttgtctgaagccggacgtgagctgtttgccgtttcacggctcaaaaaagccaatcctaacgacgccgaccgactgcgcaaatatctggctcgctttagtctgagctgggaaagcatccggtcataattcatttgaatattacttccttacgcgataaacaataactatagccgggctcgatcccggctttttataacaaacacacgcaacattcatcgcaaggaaatcattatgttatccgctattacgcggctgttcccgttatgggcgctgctgctctccgtactcgcgtattacacgcccaccacgttcaccggtattggtccgtgggtcgccacgctgctgatgctgatcatgttcggtatgggtgtgcatctgaaagtagacgattttaagcgcgtgctgtctcgccctgcgcccgtcgcggcaggaatattcctgcactacctggtgatgccgctcgcggcgtggctgctggcgatggtctttaagatgccgcccgacctctccgccgggatggtgctggtgggcagcgtcgccagcggcacggcatccaacgtcatgatctatctggcgaaaggcgacgtggcgctctccgtcactatctcgtccgtctccacgctggttggcgtgattgccacgccgctgttaacccgcctgtacgtggatgcgcatattcaggtggacgtgatggggatgctgctgagcattctgcagattgttgtaatcccgattgcgctggggctggtcattcaccacctgttcccgcgcgtggtgaaggccgttgagccgtacctgcccgcgttttcgatggtctgtattctggcgatcatcagcgccgtggtggcgggttccgcctcgcacatagcttccgtgggctttgtggtgatcgttgcggtggtgctgcataacaccattggcctgctgggcggctactggggcgggaaactgtttggcttcgacgaatcgacctgccgcacgctggcaatcgaggtagggatgcagaactccggcctggcggcggcgctcggcaaaatctacttctcgccgctggcggccctgccgggtgcgctgttctccgtctggcacaacctctccggctcgctgctggcgggctactggtccggcaaaccgattgaggaacaaacgaaaaaagatgcggtgaaacagggttaattgactcagcttgctttacactgaagcctctctctcaggaggcttcagcaatggcgacaccacgtttgacccagaaagacatgacggaagccgagcagcgcgaactgaaaacgcttctcgaccgcgcccgcatcgcgcatggccgtacgctgaccaacgccgaaaccaatcaggtgaaaaaagagtacatcgacaaactgatggcgcagcgtgacgccgaggcgaaaaaagcccgcaagctgaaaaaccagcaggcttataagccggatactgaaacgaccttttcctggtcggccaatacctctacccgtggaaggcgctagctagcgccctttctttttacggccaggctgggtaaatcgcttcccgttacccggtttgccgcgtcctttctcttccgcctgcggcgccttcacgaccggacgtttaatcgcctgggttttcggttttgctttggccttcggcttcgcttcggacgaggaattctcgataagcttgaacagctcaatcagttcgtcgtccgttaagtcgcgccattcgcccagcggaatgccagtcaggctgacgttcatgatgcgcgtgcgctcaagcttcgtcacttcataaccgaagtactcgcacatgcggcggatctggcggtttaagccctgcacaagggtaatacggaacgcaaacggcgcttctttcttcaccttacactttttcgtaacggtaccgaggatcggcacaccggcgcccataccgcgaataaagtcgtccgtgaccggcttattcaccgtcacaatgtactctttctcgtgatcgttaccggcacgcaggatcttgttgaccagatcgccgtggttggtgaggaaaatcagcccctgagagtctttatccagacggccaatcggaaagatacggctgctgtggttcacgaaatcaacgatgttgtcccgctcaccgtcttccgtggtgctgacaatcccaaccggtttgttcaacgcgataaacaccaggtcttcggcatcacgcggttcgatgagctgaccattcactttaaccacgtcgccaggcatcacctggtcaccaatcgtggcgcgtttgccgttgaggaacacattaccttgttcaatgtaacggtccgcctcgcgacgtgagcagatcccgctctcgctaatgtatttgtttaatcgggttgattgagttggcagcatagtttctcctgtgaagggcgaaatataccttaggtatgggctggaaaaaaagattagccgacggtaactgagacgggttttttagtttgcgagacgctttcaggattttgcatcctgtcatttacccatgtgttcaagccttttagttttactctccatggagaagtgtttgtagtttataaatcacagggagtaatatgaaggagattgttcagacagaatccttccgacgctgggagcaaaacttaaaagatcgacgagcgaagaccattatcgcttcccgcctctttcggttggcaaatggcttagcgggcgacgttaaacccgtgggagaaggtataagtgagctaaggatccactttggtccgggctacaggatctattttaaagaccagggcaattacatcatcgtgctgttatgtggtggtgacaaaagcagccaggccagagacatactgatggcaaaaatgctgagcaatgtatcccaatggcaggagtgaatgagcatgcataaattaacaccttacgatcccgccaacgcgttggtggatgacgaggaaatcgccgtgtttatcgctgatgcactagaaacaggcgactcgacatatatcgctaaagcccttggtgttgtcgcgcgagccaaaggcatatcgaacatttcacagcaaaccggtttatcacgtgagcagctttatcggtcattcagtgataaaggaaacccaacgctcaaaaccacgctcgcggtcatgaaagcattgggttttgggctaacgctcaaacacgccggggattaatactcatcccgctggtcatcttcatccggctgttccatcacgctgtacgccaccgcgcagaataacgagttgaggcgcttcatatcccccagcagccccaggtggagtgagctggtctcgatactctgcacgttctgctgatgcaggcgctcaacgtgggcgtgcgagtagcggcggtttagaatgcggaagcgatgcttgttgcggcgcaggcggcgcgcgctcggcacgtcgcttgagaagaagaccagcatcgccagcttgaggttgctgaccagctgttcgtgcagcgcttcaagctccttcaggccttcaacggagaacgcccggcgtgcggccagcgacttatcggcaatctcgctgcccatgcgctcaacaatatcggaggcctgctcaaggttgagcgacatctcaatgatttccgcccagcggcgggactcctcctccgccagctcgtcctgcggcatgcgggccaggtaaagcttaatggcggtatagagcacgttgatatcgtccgccagtctgcgcagctctttctcctctcgcggctcgccgtgcatcaccttttgcagcccttcgagcatggtttccagggcgtcgcccatgcggagcgtctcgcgcgcggcattcgccagcgccagcgccggggtgtccagcgcggaggtatccagatgctttggcttcaggcgggcgtccagctccggttcgtcctgaatgagtcgctcgcagaagcgggccatcgacccggcaaaagggaccatcgccaggcagcgcaccaggttgtagaacacgtggaagtagatcaccagctccgccttcggcagcgggaggttatccatcaggttcgccagcggatggataaagggcagaataatcaggctgcccaccagcttaaacagcaggctaccgagcgccacgcggcgggcggcagcgttggcggcgctgttattgagcatcgccagcaggccagagccgaggttggcaccgatcaccagacacagcgcgaccgggaaggagatcgccccggcggcggtgagcgtggccgtcagcagcacggcggccaggctggagtagctgacgatggcaaacaccgcgccaatcagcgcgtcgagcatgatgtcaccggtcagggaggcgaagatgacctgcacgccgttggcctcggtaatcggggtgaccgcctgcacaatcagctccagcgccagcaggatcaaccccaggccaatccccacgcgtccaagctggcccgcccgcgtctgtttgcggccgaggaagaagatgacgccgacaaaaatcagcagcggcgacagccatgagagatcaaacgtcaggatacgcgccatcagcgcggtacccacatcagcccccagcacaatgaccagcgccggggccagcgccaccagatcctgcgccacaaaggaggtgacaagcagggttgtggcgttgctgctctgaacgagtgccgttacgccaatgcctgcgcagaaggcgagcggcctcttctcaacgctgctgctgagaacggtacgtaaacgggcaccaaatacgcgcatcacgccggtacggacgatatgggtgccccatacgagcagtgcgactgcagagagcagatgtaacagggtcagcacggatggttttcctccttatctttatcggttttcctgaggttccctgcgcgttgccatgtcggatgacggcgacgccttatccgacctacgcacaggcccggtaagcgcaccgccaccgggtgccagggatagaaccttatttcagtataaggggttaagcgtaagaaagagacaaggcacccatgaggtgccctgtttgttgtaaggaaaagtgacgttagtctgcgtcgtagcctaaattcggtgccagccagcgctctacttctgacacgctcatgcctttgcgcagggcgtaatcttcaatctgatcgcgctgaagctgcgccacggcaaagtacttgctgtccgggtggctgaagtaccatccggagacggacgcgcccggccacatggcgtacgactcggtgagcttcatcccggtatgggcttcgacgtccagcagttgccagatcgtgcccttttcggtgtgttccgggcaggccgggtagcccggcgccggacgaatcccctggtagttttcgcggatcaactcctcgttgctgaggttttcgttcgccgcgtagccccagtgcaccttacgcacgcgctcgtgcaggtactcggcgaaggcttccgccaggcggtcggcgatcgctttcaccatgattttattgtaatcatcgtgctgcgcttcgaacgcgtccgccagcgcatcttcttccagaccgccggttaccgcaaaggcgccaatatagtcggctttaccgctcagcttcggcgcgacaaaatcggccaggcagtagttggcaaagcccactttctcggtttgctggcgcagatggcggctgactgccagcacgtgagtgcgggtttcatcgcggtaaatttcgatgtcgtcgcccacgcggttggccgggaacagccccaccacgccgcgtgggttgagggttttctccgcgcttagcctgtcgagcatgtcgttggcatcgttaaacaggcgtttcgcctcctcgcccaccacctcatcttccaggatgcgcggatatttgcccgcgagcgaccaggtcataaagaacggcgtccagtcgatgtagttacgcagcgtttcgatgctggcgctgacctcctgaacgcccaggcgatgcgcgaccggcggcgtatagctcgaccagtcaaacgccagatcgttatcgcgcgccgcctggagtgaaactggcggggtgcgcggtttcttgcgcccgtgctggatgcgaacggtttcgtactctttgcgggtgcgctcaacaaactcgtcgcgctgggtgtcagagagcagcgcggagaccacgcccaccgtgcgcgaggcgttctgcacgtagaccgtcggcccgctgtagttctgctcgattttcaccgccgtgtgcgccttggaggtggtcgcgccgccaatcagcagcggaatggtgaagccctgacgctccatctccttcgccacgttaaccatctcgtccagcgacggggtgatcagcccggagaggccaatcaggtcagcattcacttcgcgcgcggtcttgaggattttatccgccgggaccatcacgccaaggtcgataatctcgtagttattacactgcagcaccacgccgacgatgttcttgccgatgtcgtgcacgtcgcccttcacggtggcgatgaccattttgccgttgctggagcctttctctttgctggcttcgataaacggttccaggtacgccacggcctgcttcattacgcgggcggatttcaccacctgcggcaggaacattttgccctcgccgaacagatcgcccaccacgttcatgccgtccatcagcggcccttcgatcacttcaatcgggcgggctgactgctgacgcgcctcttcggtgtcctgctcgataaactcggtgatgccttttaccagcgaatattccaggcgttttttcacgtcccaggcccgccactcggcctgctgaacgttggctgcgtcatccgacttgctgccgcggtatttttctgccaggtcaagcagccgctcggtcgcgtcgtcgcggcggttgaggatcacgtcttccaccgcgtcgcgcagctcggcgggcaggtcgtcgtaaatcgccagctggccggcgttaacgatccccatgtccatcccgttgcggatggcgtagtagaggaacacggcgtgaatcgcttcacgcaccgggtcgttgccgcggaacgagaacgagacgttcgacacgccgccggagatgagggcatgcggcagctcgcgcttgatgtcctggcacgcgccgataaagtcctgggcgtagttgttgtgctcttcgatgccggtcgccacggcgaagatgttcgggtcaaagatgatgtcttccggcgggaagcctacctcttcggtcagtattttgtacgcgcggcggcaaatctcaattttacgcgcgcgggtgtcggcctggcccacttcgtcaaaggccatgaccaccacggcagcaccgtagcggcggacctgcttcgcgtgatgaataaaggtatcaacgccctctttcatggagatggagttgacgatgcctttaccctgaatgcacttcagccccttctcgatcacctcccatttggaggagtcgatcatgatcggcacgcgggcgatgtccggctcaccggcaatcaggttgaggaaacgcaccatcgccgcttcggcgtcgagcatcccctcatccatgttgatatcgataatctgcgcgccgctttccacctgctggcgggcaacatccagcgcttcgctgtacttctcttctttgatcaggcgtttgaacttcgcggaaccggtgacgttggtacgctcacccacgttcacaaacaggctgtcgtcgccgatggttaacggctcaaggccggagaggcgacaggcaaccggcagttcgggcagcttgcgcggcggcagtccggccacggcgttgctcatggcggcgatgtgctccggcgtggtgccgcagcagccgccgacgatgttcagaaatccagactcggcccactcgcggatttgtgccgccatggtgtcggcatccagatcgtattcaccgaaggcgttcggcagaccggcgttcgggtgcgcggtaacgtagcattccgcaatgcgcgacagctcctgcacgtactggcgcagctcgtccgggcccagcgcgcagttcaggccgaaggagagcgcgtcggcgtggcgcagggagttataaaacgcttcggtggtctggccggacagggtacggccggaggcatcggtgatggtgccggaaatcatgatcggcaggtcaacgcccagcgcctcgaactcctctttcaccgcgtaaatcgcggccttggcgttgagagtgtcgaataccgtttcaatcaggatcagatcggaaccgccttccaccagcgctctggtcgattcacggtaggcaacaaccagctggtcaaaggtgatattacgaaacgccgggtcgttgacgtccggtgaaatcgacgcggtgcggttggttgggccaagcaccccggcaacgtagcgcggcttgtccggcgtgcgggccgtccactcgtcggcgcaggcgcgcgcaagctttgcggcttcaaagttgatctccgccgacagggattccatctggtaatccgccatggcgatggttgtcgagttaaaggtgttggtttcaacgatatccgcacccgcttcgaagtaggcgttgtgaatatccttgatcacggacggcttgctgagcaccagcaggtcgttgttccctttcaggtcgcagggccagtcggcgaagcgttcgccgcggaaatcgtcttcgctcaggcgataaccctggatcatggtgcccatgccgccgtccagcaccagaattcgttcatttaactgcgcacgcagttgctctactttgctgctcacacttgctcccgacaacgctcaacaaggccaaaaggctgcgttccatactggcacaatctcgcagggtggaaaagtcgctcagcggtaacatgagacatgttcaccatcactcctccgatcagtcaggataacggttgcaaattcaccaaataaaacgaaaatgatttccacgatacagaaaaaggagttcgtcatggtcgcgaccgttcccgctaaacgcggcagaaaacctgctgccaccaccgctgccgcacaacagggtggacaggttcaatcgctcacgcgcggtctgaagctgctggagtggatagccgagtcgcacagcagcgtggccctgacggagctggcccagcaggctggcctgccgaactccacgacgcaccgcctgctgaccaccatgcagcagctgggctttgtccgccaggtaggcgagctggggcactgggcggtgggcgcgcatgcgtttatcgtgggcagcagcttcctgcagagccgtaacctgctggcgattgtgcacccgattctgcgcaaattgatggaagagtcgggcgagaccgtgaatctggccgtgctcgaccagagcgaccatcaggcgattatcatcgaccaggtgcaatgcacgcagctgatgcgcatgtccgcgccgattggcggcaagctgccgatgcatgcctcaggggcgggtaaagcgttcctctcgcagctgaccgaggagcaggtgacggggctgctgcaccgtaaaggactgcatgcctatacccacgccacgctggtttcgccggtgcatctgaaagaagatttggccctgacccgcaagcgcggctattcgtttgacgacgaggagcacgccctcggcctgcgctgtatcgcagcctgcatttttgacgagcaccgcgagccgtttgccgccatctctatctccgggccgatttcgcgtatgaccgacgatcgggtcactgagttgggtgcgctggtgattaaggcggcgaaagaggtcacgctggcgtacggtgggattcgttaagcatgcattgccgggtggcggcttcgccttacccggcctacatgatgccctctgaaaaccggatgcaaaaccgctgcttacggcggtaagcgtacacatcttccacgtgcccgtttttgatccgcgtttgcagtccccgccagtagctggcgcgaaacagatcggcatgcatctcttcgaatagcggcccgatgcgcggatcggcgcagagccagtgtcgaaactcttcgggaaacacatcgcccggcgaaacgctgtaccacggctcgctggaaagctcatcttccgggtagcggggcggtgggatgtcgcggaagttcacctcggtcatgtagcaaatttcgtcgtaatcgtagaacactacccgtccgtgacgggtgacgccgaagtttttgaacagcatatcgcccgggaagatattggcggcggcaagctggcgaatcgcgttgccgtactcttcaatcgcatctcttaaagcctgaccgtcggactgctccagccagatattcagcggcaccatgcgacgttcaatgtagagatggctgatcgcgattttatcgccaagatcggtgattttggcgggtgcttcctgcagtaaaagcgccatgagcgccggatcgatctgctgcttatccagcacaaaattttcgaactcctgggtatccgccatgcgcccaacgcggtcgtgctccttaaccagctggtagcaggcgcggacgtgcgcggcggtcatctctttctgcggcgcgaatctgtccttaatcaccttaaagacccggtcgaagcccggcagcgtaaaaaccagcatcaccatgccgcgaatgccgggcgcttcgatgaactgctcatcagcggtagtgacataacgcaggtattcccggtagctttccgttttagcgtgcttctggcagccaatagccatatacagctcggcggtggttttgcccggcaggatctcacgcagccattccaccagcgcggcaggtaacggtgcatagaccataaaataggagcgggcgaagccaaacacgatgctggcctcggcgctggtggtcaggcaggtatcgacaaacagttccccgccgtcggtgcggtgaatgggcagcagaaacggcacaatggccgtcggcgtaaccagtttgcccaccagccaggcggctttattgcggtagaaaagctcgttggccacctgcaaatggctgtggctgagcacctccgtgctgaaggcttccttgagatgggcgtggatatacccgatatcccgggctttattctcccagggcaggcgcagcggcagatctgtcagcacgcggtgcaggagcttttcccatccgcgatcggggaagaaatctttcgccagcggacgcggaatggtacgaaagcgccgttcaggctgggagctgaagataaataaccgctcaggagataatgagcggtggtcaaataaccggcaatagacggagttgaaaaagctctccgcaatctcgaagcgcgggtagtcgggtaacaaatgggtgtaatgctcttttacgcgcagtaaaaattccgcgtccggacttttaccgtcggtaatacagcgcaactgctccaccaccagacccacgtggtggtcataaagatggatacgctgcttcatggcctgctgaaccgcatgccagtctgcgtgttcgaagcgctgctgcgcgccggaggtcacttcaagaaaacgaccatactgggcatcgaagccctgcaaaatagtttgggcaatcagtaattccaggccacgcgacatatattccccctcaccaccaaccctctccccaggggggagagggggaaaagattagaactgtgcttcttccgttgaacccgtcaaggctgtgacggaggaggtgccgccctgaataatcgtggtcacattatcaaagtagccagtgcccacttcctgctggtgagagacgaaggtgtagccatctttgcccgccgcaaattccggctgctgcaccttctcaacgtagtgcttcatgccctcaccctgcgcataggcgtgcgccaggtcgaacatgttgaaccacatgctgtggatgcctgccagcgtaatgaactggtatttgtagcccatgtcggacagctgctgctggaagctggcgatggttttgtcatccagctttttctgccagttaaaggacggcgagcagttgtaggccagcagtttgcccgggtacttcgcatgaatggcgtcggcaaagcgttttgccagcgccagatccggcgtggaggtttcacaccagaccaggtccgcgtacggcgcgtacgccagaccgcggctgatcgcctgctcaatgcccgcatgggtgcgatagaacccttcgctggtgcgctcgccggtgatgaactcgctgtcgtacggatcgcagtcagaggtgatcaggtcagccgcgtccgcatcggtacgggcaatgaccagcgttggcacgccgagcacgtcagcagccagacgcgcggcaaccagcttctgaaccgcttcctgtgtaggaaccagcaccttaccgcccatatgtccgcacttcttcactgacgccagctgatcttcgaagtgaacggccgctgcaccggcttcaatcatcgatttcatcagctcaaaggcattcagcacgccaccgaagcccgcttccgcatccgcgacgatcggcaggaagtagtcaataaagcgcggatcgttgggttcgatgcccgccgcccactggatctgatccgcacggcggaaggtgttgttgatccgatccacgaccgacggcacggagttagccggatagagcgactgatccgggtacatgctggaggccaggttggcgtccgccgcgacctgccagccggagaggtagatagcctcaataccggccttcgcctgctgcagtgcctgaccgccagtcagcgcgccgaggctgttgatgtagccctttttagagccaccgtgcagcagcttccacattttcgcggcgccattttgcgccagcgtacattccggattgaccgagccgcgtaatttcaccacgtcttccgcgctgtacgggcggcggatgccttcccagcgaggttgtgtccactctttctttaattcttcgatctgttgggtacgggttttcatgtgcagatgctccatattgttatgtggtgagttacgccaggaagcggtagcccggcagggtcaggaagtcgattaagtcatctgatgtggtgatttgctccatcaggcgcgcagcgtcgtcaaaacgtccgctgctgaagcggtgttcgcccagctcgtcctggatcacccgcatctcttcggccagcatctggcggaacagggtcttggtcaccggtttgccgttgctaagcgttttttgatggtggatccactgccagatagaggtacgtgagatctccgccgtcgcagcatcttccatcaggccgtagatcggcacgcagccgttgccggagatccacgcttcgatgtactgcaccgcgacgcgaatgttggcacgcatgccctcttccgtacgttcacccgcgcacggcgccagcagctgttcttctgcgattggtgcatcgtcttcacgggtgacaaacagctggtttttgttgtcgccgagcacgcggttaaagacctccatcgccgtatcggccaaacccggatgggcgatccacgtcccgtcgtggccgttacgtgcttcaagctctttgtcggctttcaccttgttgagcacctgattgttgcgctctgcgtctttgctcgggataaaggctgccatgccgcccatcgcaaaggcaccgcgcttgtggcaggttttgatcagcagacgcgaataggcgctcaggaacggtttgtccatggtgacaacctgacgatcggggagcacgcgatcgggataatttttcagggttttgatatagctgaaaatatagtcccagcgtccgcagttcaggccgacaatgtggtcgcgcagcgcatgcaggatttcatgcatctggaatacggcgggcagcgtttcaatcagcagggtggctttgatggtgccgcgcggcaggttgaaacgatcttccgcatagctgaagacctcgctccaccaggctgcttcctgccaggcctgcgttttaggcaggtagaaatacgggccgctgcctttcgccagcagggctttgtagttgtggaagaaatagagtgcaaaatcaaacaggcttcctggaatggcttctccacgccaggtgacatgtttttcgggcaggtgcaggccgcgcacgcgacagatcagcaccgccgggttcggtttgagctggtatattttgccggcttcattggtatagctgatggtgccgtttacggcgtcgcgcaggttgatttgcccctcgatgaccttacgccagtccggtgccagcgagtcttcaaaatcggccataaagactttaacgttcgcgttcatggcgttgatcaccattttgcgttctaccggaccggtgatctcaacgcgacgatcctgtaaatcttcagggatgccgcggattttccactcgctacgacgaatggaagcagtttccgaaataaaaccaggcaacttgccgttatcaatttcctgctgctgatgaatacgtgccgccagcagcttattgcgctgcggcgtaaagcgggtcaccagttcagtcagaaattctaccgcttctgccgttaatacttgctgttcttgctcgccatacggctgggtaaaggccagttcatcgaccgtcgttgcctgttgagtcattactctgctcctcatcaaagatccaaaatcacgctcccgacgcgaacgaaagatcgttgggtagttttcgctcagcagaattaagactatctctattttttctaaaatcaaaaacaatttccattttaattataaattgctattaattgattgattttattgaaattaaagttttaaagaatgttgagtgacatttcggaaataaaaaaggcacccgaaggtgcctgatttgaatagctgaaacgctttaggattgtttagtgcagacgattactccagcgtcgggttcatgtgacgcagatcgtatggtgttatctggtagacgtaatagttgagccagttagtaaaaagcaaattcccgtggctgcgccaagtcgctctcggtttgttttgcggatcgtctttcgggaaatagttgtacgggacatccgggttcagacccgcttcgacatcacggaaatactctgacgcaagggtgtgcggatcgtattcaggatgtccggtcacaaaggcaatgcgcttatctttactggcaaacaggtaagcgtccccatcttccgtttcggccaagatctccagatcggtgtaatcacgaatcagctgggccgggaagtcagcgtagcgggaatgcggagccaggaaagaatcatcaaacccgcgcgtcagcaacgcatggggatggagaatatggtgttcgtatacgccggagagcttttcagtgcgggtttgcttggggatgccatacaaaatattcagtgcggcttgtaccgcccaacagacaaacagcgtggacgtgacgtgatcttttgcccactccagcacctgtttgatctgcggccagtaggcaacatcgttaaattccaccaggccaagcggcgcgccggtcacaatcaatccgtcaaagttttcaccctgaatatcatcaaagttgcagtagaagttgttcaggtgctcagaaggcgtgttgcgagactcacgggcgtcgatccgcagcagctgaatatcaacctgcagcggggagttcgacagcagacgcaggaactggttttctgtttcgatctttttgggcatcagattgagaataagcaccttcagcgggcgaatttcctgacctgtcgcacgtgaagtcgtcatcacaaagacattttcttcacgcaagaaattgacggctggtagctcgtcctgcacccgaatcggcatagctttatatcctcacaacatacgtataaacgtttagacatccagacagctaacgatacccagaaatgatcggaatgtcgagtctgcaaggcgaaggtgagaaagtttcagggagagggagaggaagaaaaacccacacctgctatgagcccaatggaggagatgagtttacgcatgtaatatccctatattaaaaaaagaccctgtttttatcggcttatcaggatgagactttacgcttttttattttgcttcgttatctggcgtattcaatgcctcccccgagttttgtacaaaacctcaaccctctaatctttatgtttacacagcggtaacaaaataggtaccatacccccctatagtatcaggagggcgtatgccgcattcacccgaagataaaaaacgtattcttacccgcgtccgccgcattcggggccaggttgatgccctggaacgcgcgctggagtcgggcgacccctgtctggccatcctgcagcaaattgccgccgtgcgcggggctgccaatggcctgatgggcgaaatggttgaaattcacctcaaagatgagctggtagcgggggacaccacgccggatcagcgtgccgttcgcatggcggaagtcggtcatttactgcgctcttatctaaaataaatccacatacctgacaagaagggaagacatatgaaatctcgcgctgcagttgcatttggccccggccagccgctcaaaatcgttgaaattgacgtggcaccgccgaagaaaggcgaagtgctgatcaaaatcacccataccggcgtatgtcataccgatgcgtttaccctctcgggcgacgacccggaaggcgtcttcccggcggtgctcggccatgaaggcggcgggattgtagtagaagtgggcgagggtgtgaccagcctgaagccgggcgatcacgtgatcccgctgtacactgcggaatgcggcgagtgtaagttctgtaaatccggcaaaactaacctctgccaggccgttcgcgccacccaggggaaagggctgatgcccgacgggacgacccgtttctcctacaacggcgagccggtttatcactacatgggcaccagcaccttcagcgaatacaccgtttgcgcggagatctcgctggcgaaggtgaaccctcaggcgccgctggataaagtctgcctgctgggctgcggcgtgaccaccggtattggcgcggtgcataacaccgcaaaagtcaaagagggcgataccgtggcggtgttcggcctcggcggcattggtctggcggtgattcagggcgcggtgcaggcgaaggccggtcgtatcattgcggtcgacaccaacccggagaaattcaggctggcgggtgaaatgggtgcgaccgatttcgtgaacccgaaagatcacgagaagccgattcaggacgtcatcgttgagatgaccgacggcggcgtggacttcagcttcgagtgtatcggcaacgtcaacgtgatgcgttccgcgctggagtgctgccacaaaggctggggcgagagcatcatcattggcgtcgccggtgcgggtcaggagattaaaacccgtccattccagctggtcaccgggcgcgtatggcgtggttccgcgtttggcggcgtgaaggggcgtacccagcttccgggtatggttgaagatgccatggtcggcaagattcagctcgatccgttcattacccaccgcttaccgctggaacagatcaacgaggcgtttgatctgatgcacgaaggaaaatccatccgtaccgttatccatttcggcgacaagtaactcttctgccagcggtttttcgccgctggcatttctttaataatcttctctaaagtgtgaccagtgcggcgtttttagccgtaatctaaatctctgccgtgccgatgactatttaacaggcgtgtttttacgcatcttacctacaagagagtcgacggtcatggacaacactacttcgatgctggcgcagcgcaagctgggcttcttgcatcacatcaggctggttccgctgttttcctccattctcggtggcattattcttctgtttgccttgagctcgggtctggcagggtatttcctgctgcaggccgataacgatcagcaggatgtcacatccgaaattcaggtgcgtatggggctgtcgaacagctcaaaccatctgcgaaccgcgcgtatcaatctgatccacgccggtgcggcaagccgtatcgcagagatggatgcgatgaagcagaacatcagcgaggcggaaacgcgcattaagcagtcccaggagagctttaccgcctacatgaatcgcgccgtgcgtaccgccgagggcgcagcgctggatgcggagcttaagacccggtatgacgcctatatcgcgggcatgcagccgatggtgaaattcgccaaaaacggcatgttcgaggcgatcatcaatcacgaaaacgaaacggcgcgtccgctggatgacgcgtacaacgccgtactgctgaaggcgattaagatccgtaccgaccgtgccaatgcgctaacggcgcaggcgcacagccgcacgcagctgggtctgatgtttatggtgggcgcgtttgcgctggcgctggtgctgacggcgatgacctttgtcgtgctgcgccgcacggtaatcaatccgctgcagcgggcagcgaaacgtatcgagaatatcgctaagggcgacctgacgatgccggacgacgtggccgggcgcagcgaaattggccgcctgacgcgggatctgcaaaccatgcagcactcgcttgaaaaaacggtcggcaccgtgcgtcagggggcggaggagatttaccgcggcaccagcgagatctctgccggtaacaccgatctctcttcccgcaccgagcagcaggctgccgccatcgagcagaccgccgccagcatggaacagcttactgcgacggtgaagcagaacgcggataacgcccatcatgccagcaagctggcggaagatgcctccgggaaagccacccgcggcggccagatggtctccggcgtggtgaaaaccatgggcaatatctccagcagctcgaagaagatctctgaaatcaccgccgtgattaacagcattgccttccagaccaatatcctggcgcttaacgcggcggtagaagcggcgcgggcgggtgaacaggggcgcggatttgccgtggtggccagtgaagtgcgcaccctggcaagccgcagtgcgaatgccgcaaaagagatcgaaagcctgatcaacgaatcggtttcgctgatcgatcaggggtccggtgaagttgttgccgccggtaacaccatgaatgagatcgtcgaagcggtgaagcgcgtgaccgacatcatgctggagattgccgcggcgtccgatgagcagagtcgcggtatcgtccaggtgagccaggcgatttcggagatggataaagtgacccagcagaacgcctcgctggtggaagaagcctccgcggcggcggcgtctctggaagaacagggcgcgcgtctgaccgaggcggttggggcgtttcgtctgagcggtgcgaagccgaaccgcgcggtgacggctgcaccggtggcgcagaacgtaccgttgcgcccggcggcgacggtttccggggataactgggagacgttctgagtcgcgtgttttgtcgggtggcggcttcgccttacccgacctacttgtatttgtaggcccgcgtaagcgaagcgccaccgggcaaaaaaaagggaccaaaaggtcccttttttcatcggttatttcttatcaggtaacgcgtacgcgataacgtaatcaccgcgatccggcgactggcgggcgccaccggcgttaatgatgatgtactgcttaccggttttcggcgacacgtaggtcatcgggccggactggctgccgaccggcaggcggtctttccagatctctttcccggtggcggtatcaaacgcgcgcaggtagaaatcctgggtgccggcaaagaacagcaggccagactgggtcgagagcgatgctccaagcgtcggcatgccgattgggattggcatgtgcatgcgaatgcccagcgggccggtatcttccaccgtgccaacaggaacctgccacaccagcttgccggttttcaggtcaacggccgacatggtgccaaacggcggcttctggcacggaatgcccagcggcgacaggaagcgctcgcgcatcgcgccgaacggcgtgccgtccatcgggacaatccccatctcgatgccgctggcatctttcgccacgttcgcgcgcggcaccatgtagtttgccaggcccagacgcatatcgttgacgaacatcaggctgttgttcgggtcaacggagacgctgccccagttcatcccgccgagtgagccggggaactgcagggaacggtcgagacccggtggagtgaagacgccctgatgacgcatctctttaaactgaatgcggcacagcagcaggtcgactggcgtcgcgccccacatgtcggactcggtcagcgtctggttgccaatcatcggcatgccaacagagtacggctgggttggggagtagcgttcaccttcaacgttgcccgccgggacagggcgttcctcgaccttcgccaccggcttgccggtttcgcggttaagcatgaagatcatgccctgcttgctggtctgcaccagcacaggcgtggtgccgcccttgccgtcaggcaggtcgtacagcagaggctgggaaggcaggtcaaagtcccacaggtcatggtgggtggtctggaaatgccagcggacctggccggtggccgcgtcgacggcgacgatggaggaactgtacttatcgtccagcgcggttcgctcgcccgcccagaagtctggcgtggcgttgccggttggcaggtagatcaggttcagtttggcgtcgtaagacatcgcagaccagacgttcggcgtgccgcgggtgtaggtctggccttccggcggcaggccggtcaggttcggattacccggatcccacgcccaggccagcttaccggtgtgaacgtcgtaggcgcggaccacgcccggcggctcgccggtcgagtagttatccgcgacgcgaccgccgacgacaacgacgttcccggccaccagcggtgtcgaggtttgctgataatatcctggcttgatctcacccataccgacgctcagatccacggtgccgtggtcgccaaagtcgtcgcagaccttgccgttatccgcgttaatggcaatcagacgggcatcggtggtgggcaggaacaggcggcgagggcatgccgctggcgatgttccggtctgtgacgctgtcacgtttgcatgatcttcaaagtagcccagaccgcggcagcgctgccagttcggcgcggtggctttcgaatcataacgccatttttctttaccggaatccacgtccagcgccagcactttactgtacggcgtacagacatacagcgtgtcgccaacctgcagcggcgtgttctgatcttccgcacccgagccgttgctctgcggaatatcgccggtgtgcgcaacccacgcgactttcagcgagctgacgttttgcttgttaatctggtccagcgcggcgaagcggtcgccgtgggtggtgttgccccagtgctcccagttcttttgctgctcgccgggtgcgacgggtttcaccggcacgggctcgttcgctaccacaagggtctgcggcttaaacatccagccgaggctgaccagcatggccaccgcgagcagcgccgcgacgccaaaagcgggggctttgtttggtgcagtgtggtttgccgcacgcaggaagggccagacgatggcgcacaggaacgccagcacggcaaaggtaaacaggcgggagaagagcggccagaaatcccagcccgcatcgcttaccgcccagaacagcgaggcaataaacgcgatgccgtaaagcaggatcccgctggtgcggttgaggaaaatcaggatcgcggcaatcaccattgccacgcccattatcaggaagtaactactcccgcctacggtggcgagcttaaagcccaacccgctgaccgccagaccgatgagcatcatcagtccggcaagaagccactgcagaatacgcggtattccacgtggcgcgctgccaaatgccatttctctctcctttagatcccgccgccgtgtcgggtatgtaccagttgggtaataaatgcggtgggattgatgattagtacgggtgaattcgtttttatcaaaccgtttgtgaaccatttggtgaattcacggctatgataaaactgttaaattgttttacgcaattgttaatgaatgatttcgcattatttgattaacgcgcaggtctgttccctcgcccctttaggggagagggctagggtgaggggtattaaaccggcatcgatttacggatggcgctcagcagcgtctgcgcgcccgtggaaagcggggtatctacccgggtcaaaatgccgataggttcaccggcgccgggggccgttaccgggagagcggtcagcgtgccctggcgcaaatcatcttttaccgcgccggagggaacgaaccagacgtagtcatagtcgagggtgagctggcgtgaaagcgaggctgacagcgtttcgatacaccctgagggcagcgtacacccctgcatttgcagcaaggtttcggcggtctgacgtgggacggtccctttcgggcacaccaccaccggccactccatgacgcggcttaacgtcaccgtgtcctgcagcagcggatgatcgggacgaaccaccagcttcagggactccaggaacagcagctcgtaattgagaccgcccatcagttcagggtcggacatgcggccaatcccgatatccagctcgcccgatttcagccccgcgagcagcatggtgttattcatggtggcaacctggatcgtggtatgccgttgctgcttgtggaactggccaatcaccggcggaagaatgcccagcgcggcggtgggcagtgccccgacgcggacggcctcgctggtgtgttcttcttttcgatgcagcgactggcctgcggtattgagcgcatccagcaccttaacggcatgcgtaaggaactgttcgcccacgatggtaagctgcgcccccagccgaccccggtcaaaaagacgggcgccggtcagctgttcgagctcgttgagggttttcgagagcgcaggctggctcaggttaagagtttcagccgcacgccccagcgttccctgttgagcgacggccacaaatgtatgcaaatggcgcaagcgtatgcgctgactgaacagaccatttttttccataggcgatgttaaaaacagagcgatgcgggtgacaagctaagttgtttaattttgataacttgatagcaaaatatttttaacatttgatctgtttgagttacaacatgtttttcggcaggggaagaaaagtgaacatccttgttcatttattgctcattgcaaagagggaggggtaaggggttagatcacgccgtcaccgccgtcagaacaccatacctggccggaggtaaatgaacattcatccgaggccagcgtgacgtacagcggggcaatctcgacgggctgacccggacgtcccagcggggtatcgccgccaaactccttcactttttccatcggctggccgccgctggactgcagtaccgtccagtaagggccaggagcgaccgcgttgacgcgaatgcctttcggacccagctgcttggctaaggatttggtaaataccgccagacaggctttggtctgggcgtagtccagcagcaccgggctcggcttcacggcctgaacggaggaggtattaatgataacggacgaggctttcaggtggcgcagcgccgcctttgtgatccagaagggggcatagacgttggttttaaacgtcgcgtcaaaatcttcagtggtcagctcttcaagggattcacggaactgctgacgaccggcgttattgaccagaatatccagcccgcccagcttcgagacggcttcttcgaccagattctggcagaaggtttcgtcccgaacgtcccccggcagcgcgacggcattccggccttcggctttgatcaggtcgatgacctccgcggcgtctttttcctcttcaggcaggtagttaatggccacatcggcaccttcacgggcataggcgatggccactgcgcgaccgatacccgagtcaccgccggtaatcagcgctttttcaccggccaggcggccatgccctttgtagctggtttccccatggtcgggtacaggttgcatttcggatgccagtcccggtggcgtctgtggctgttccgggaacgggggctgcgggtaagcgttcgtacgttgttgggtatcactcatagctgactccttaagccaaggggtgagatttgatggataactgcagcgttaacgcttcgctgaattatttctgcaaacgatcgacacggacgacggcaggagatgattttttatcaagcgaaccgttgatgctgatcatctggtcgggttttaccgttctgccgtcgaagactgcctggggaataataacgtcgatttttccggttttatcctgaaatacaaacttatcgccgctaccgtcaataagattaccgcgtaatgaaatggtcgcaccgtcgtgcagttgttttgcctgatcgatggtcataatacgcgcgtcatcggttccgcgatatccgctatccagggcgtggggcggcggcggggcttcacctttttgtaacccgccgttattatctgcccatgcggccggaaccagaaatatcaaaaaagcggaaataagcgataatttcatcggatatccttcattttgggtgtcttgacttattaagtattgttgctattcctttatgtggcaaatgtgataagtcctaaaaacattcgcgttagaaatcaaaattatcggataataagcgaaacggtgacgatggccatgaatcgtgaaaatgaaaagttacccgggatagaggaaagatatcgcttgctgacgtttgaatacgcgtttcgtcaggtggggtttattgttctgttaggtattatcgttgccgccattgccggtctgttttcaagcggaatagtcagcgatacggtaaaaacaaattccgctaagtcgctgaccataaactatgagcgcttcgggcggcgggagacggagacacggatgcagcttgcgtttccggtgaaaacggaggggacctataccctcagcgtcaccagcgagagtagcgatgcgtatgatccaggcagcgtctggccccagccggacgccatgttcagccacggaaatagcctctattttgtttatcacaacctgaaaaagacggacaatttttcggtattactctttaccacaccgtcacgcgccggtaaatggaactcggttattcgcgtaaacaacgagccggagatcaccctctggcaatttatttacccgtaggaggctgatatggatatggtctttcgtgcgctggcgatttatctgttcctcgtggtggtatttaaagtggccgggcgacgcgcgctgctgcagatgaccagctttgatctcattcttctcctgataattagtgaagccacgcagcaggcgcttctggggcagaatttttccgtcaccggcgcgatgattacgattaccaccctggtggtagtggatattatttttggccttatgaaaaagtatttttccccggtagagaatattctggacggcactcccgtgattctggtggaaaacgacgttcccctggcggataaactcaaaaaagtcgatgtctcttgcgatgatattttgatttcagcgcgtcagaataatggcattaccgaaataagccaaattaaatatgccatacttgagcgcaatggacatatttcaatcattccttttgagaaataagaggcggcaagatgagcaattttttgcacgataaccataacaccgtgggtgaactgacaaaaaaactggcgagcaagttaaccgatgccgggctgcgcttaaccacggcggaatcctgcaccgggggaaagctctcggtggcgctctgcgctgaagagaacacggccgatttttatgatgtcgggctggtggtgttcagcgatgccgcgaaagcgcggatcctcggcgtgcgtcctgaaacgctggcgcgctataccgccgtcagcgaacagacggtgaccgagatggccgccagcatccgcgacattgcccaggcggatatcagcatcgccatcagcggatacgctggcccggaagggggcgacgacggtacggcggcggggacggtctgttttgcgtggaacatacgtggcgagacgaaaacccgtaccgtgcttttctccggagactgtcaggacgtggtggaaaaagcggtgcatttttcgctggcagagctggtaacaacattgttggacggaaataacggttgagttcacgtggaggttctatggctgtcatagtgattaccggtgggacggcgggcgtgggaaaagccacggcgctgcgctttgcaaaagcaggttacgatgtgggcctcatcgcccgtgatgaagccagcctgcactccacccaggaagagctgcgccgcttcggcgtgaatgcgcacgccgtgcaggcggacgtcgccgacagtcaggcggtggtggatgcggctaacgagattgagtatcgtctcggtgcgattgatgtctgggtcaacaacgccatgggggccgtgctggcaccgtttcgtacccttacgccggacgagtttcggcgcgtgaccgaggtgacatacctcggctacgtgaacggcacccgcgcggcgcttgagcttatggttccgcgcgacaggggcgtgattattcaggtagggtccgcgctggcctaccgttccattcctctgcagtccgcctactgcggggccaaagcggcgatccgcgggtttaccgatgcggtgcgtaccgagctgatgcatgagaacagccgggttcagctttcgatggtgcagatgccggggctcaatacgccgcagttcgaatgggcaaggaacaagttcgcgtgggcgatgcggccggtaccgccggtgttcgagcctgaagtcgccgccagcgccatcttcagggtggcgcaaaagccggtgcgcgagctgtgggttggcagcagcaccattcagtcgattgtcgggcagttcctcttcccgggttttctggacaggctgatggtgaagaaagcctgggaaggtcagatgaccgacgatctgaacgcgccggaccgccgggattatctcgaccagccggttaacgatctgcacaaaatccatggccgtttcactgacgaagcgaaaacccgcgcgtcgtccgtgacctccgctatgccgggcaaagtggcgttaggggcccttgcggtggcgggtattgtgttgacgcgtttgataacccgccggaaaccgtaatcagcgcagcgcgctgcggtgcgtccagaaccagcgatagccgtagccgccaaggctgagctcgacggttttaccgcaaaccagcgcgtcatcgtagcgtttgtccgcgagacaggcggtccaggtcgtgttgcggatccccttcacggtgaactgcaccggctggtcactgaagttaacaaaggtcaggatgctgcgttcttcggtctcgtaatagatccccagcaccgcgtcactgtcgatcgtgaggagccgaaagggcgcaacggcaatttcggggaactccgagcgggtattggcgatatcaatgatgcggtgcaggagcgagttgcggtggagcagcgaatcagcgacgttgattttttgatagcggtaaggaccgcggtcgataatcggcgcgataaatttttccgggtcggctgccgaaaaaccgccgccttgcgatcctgcccactgcatgggggtgcgcacggcgtagcgctcttccagatcgaggtcatcccccatgccgatctcatcgccatagcgcatcaccggaacgccgggcagggaaaagagtaccgcgtggcagaacgccagccgcttcagatcgccgttcaacatcggcgccaggcggcggcggatcccgcgctgatagacgttcatctcctcatcaggggcgaaggtatcgaggacaaactgtttgtctttctggctgatgccctccagatccagctcgtcgtgattgcgcagccagttggcaaaacagcatgaatcgggcgggacgatcatcttcttcaccgcgttgcgcagcggacgggcgcttttgcgggccaggctgacgtaaaaatatttgttgagccagaaattgagcaccagattcaggcggtcattattgccaaagtagtcctgataggcctccacctcgacgtccacttcacccagcaggatcgcgtccggattatgttcctcaatcagacggcgcatatgttcgaggatccacaggccctttttttcatcaccgtttcccgcctgcgtggtcaggtgggaggcggcatccaggcggaaccccgacacgcccagcttgagccagaagaggatgatgttctcgatctctttcagcaccgcgggcgaggtcaggttcaggtccggttcgtggcgatagaacatgtgccggtagtattgtcccgcttcgtcgtcccaggtccagatgctctcctccacgccgggaaacatggggggcgtatcgtcgtcgtcactatctgaccagaggtagtaatcccggtagggtgacgccgggttacggcgggcctgctggaaccagggatgcgcgtcagaggtgtgctggatcagcagttcaataatgacctgcatgcccagctcgcgggcctgttcgataaaggcgatgatatcggccagctttccgaagcggggatccacctggagatggtcgctgacgtcatagccttcatcgagaaagggcgtgaggtaaaacggggtgatccagataaccgtcgcccccatgcggcgaatgtaccgcagcttggccgctatcccggcgatgtccccgcagccatcgccgttcaaatcataaaagagtgcggtatcaatctggtaaataatggcccgtgtatgccagtccgtcatagcgtgcctcagtgatagccttcagtatccgaaaccttgccccggaacacgtagtagctccaggcggtgtacaccaggatcaccggaataatcagtaacgtcccaaccagcataaacagctggctggcaggcggggccgcggcctcccacagagtgatacgcggcggaataatgttcggccagaggctgatacccagtccgctgaacccgaggaagatcagccccagcgtcagcaggaaagggcgcgcgtggctggccggattgcgggtcaggcgccagatcagcacgctgaagatcccgaccagcagcggaaccggcaggaaccagaagaagttgggcagggtaaaccagcggtcggcgacgtactgccagccgagcggcgtccagacgctgaccaccgcgataaccaccatcagcgccagcagcacgtggcgggtcagttcgcgcatgcgttgttgcagcgcgccttcgcttttcatgatgagccaggtggtgcccagcagcgtgtaggcgacgaccagaccgatgccgcagaagaggttgaaaggcgtgagccagtccagcgaagagccgacaaaacgtcggccctccacgtcaaagccgttgatcacggcgcccaccaccacgccctggctgaaggtggcgagcagggagccgccggcaaaggagtagtcccagaatttgcggtgtgaaggggtggctttgaagcggaactcaaaggcaacgccgcgaaagatgaggccgatcagcatcgcggtgagagggatggtcagcgcatcaatgatcaccgcataggccagcggaaacgcgccgaacagccccgcgccgccgagcaccagccaggtctcgtttccgtcccagacgggcgccacgctgttgaccatcacatcgcgctctttggcatcgcccacgaagttaaacagcaggccaatccccagatcgaagccgtccataatgatatacatcagcgtggcaaacacgatgatggcaaaccaaatcactgagatatcgacgcccatcagattctctcctcttccggaacagactccgcggctgacagcggacgggcaggcgtgcccgaggtgtttgacgtcagcgtatcaacgggctgaggacctttcttaatcagccggatgagataaacatagcccacgccaaatacggatgagtagacgacgaagaacgccagcaggctaatgctcatctgcagggtgctgtgcagcgataccgcgtcgatggtgcgcagatagccatagacaacccacggctgacggcctacttcggtggtcacccagccggcaagcagcgcgaccagccccgcaggccccatgcagagggcaaaccactggaacggacgcgagtggtaaagtcgatggcgatagcgtagccagaggctgagcagaccgagggtaatcatcagcagacccatccccaccataatgcggaacgaccagaaaacgatggtcgagttgggtcgatcctctttcgggaagtctttcagggccgggacctgtttatccaggctgtgcgtcagaatcaggctgccgagcgcggggatctccaggccgtatttggtgcgctcttcctccatatccggcaggccaaacagcagcagcggggtggcttcgccgggcggattttcccagtgaccctcaatagcggcgattttggctggctgatgttcaagcgtgttcaggccgtgcatatcgcccaccaccgcctggatcggggcgaccagcagcgccatccacatcgccatcgaaaacatggtgcgaacggcgggcgtatcgttaccgcggagcaagtgccaggcggccgacgcgccgacaaacagcgcgctgctcaggaacgcggcgatagccatatgaataagacggtacgggaaggaggggttaaagacgatcgccagccagtcctgcgggatcacctgcccgttttcgatagtgaaaccctgcggcgtatgcatccaactgttggaggcgaggatccagaaggtcgacatcagcgtgccgagcgccaccatgcaggtcgaaaagaagtgcagccccgggccgaccttgttccagccgaacatcatgacgccgaggaatccggcctccaggaagaaggcggttaatacctcgtaggtcagaagcgggccggtaatgctgcccgcgaactgggagaacccgctccagttggtgccaaactggtacgccatcaccagcccggaaacgacgcccatgccgaagttaacggcaaatatctttagccagaagtggtacaacgatcgccagacgtcgtttttggtgcgcagccacatgccctccagcaccaccaggtagctggcgagaccgatggtgatcgcaggaaacaggatgtggaacgagacggtaaaagcgaactgaattctggccagatgaaacgcatcgagttcgaacatggtccgtacctctgagacgatggggcacgcgaattgccgggcaggtcaggcctgcccggcaaaccgattacggtttagtcttaccggcacccagctcggcaccggtcagcgggtcggaatgtggatcggacttcgtgcgggcagacatcgccttaaccagggttgcctgctcggttgtgagcgtcacgctggcactgccatcgccgccatccaccgcaggctggggggactcaacgtaatcgaaatgtttatcgctgttccagcttccgcgaacctctccaccttcagacatattgtagtacttgttggtgaattcctcgattggcggcagttttcccggcgggaaattattacggatggactgcagcgccttctcaaaggagagctgatgcgccgcctcacgcgtcatcagaaacgccagggcatctttaacgccgggatcgtcagtcacgttgatcagccgttcatagatgattttggctctggcctcggccgccacgttcgaacgcagatccgccgtcggctcgccaatggtgtcgacgtaggccgccgtccagggtacgcccgctgagttggttagcggggttccgccgccgtagagcagggaggtgatgtggctgtcattcccgttttcggtcatggagcgatacagctcggcctcattttccaccccttccgccagcgcgcccttggcacctttattcagcataccgaccagggtaccgatgatttcgaggtggcttaactcctcggtcgcgatatccatcagcatgtctttacggcccggatcgtcatcgctcaacccttgcgtaaagtagcggcaggcggcggccagttcaccctgcggtccgccaaattgttccagtaaaaggttcgccaggccgggattcggttcggcgacgcgaaccgtgtattgcagctgtttgacgtgtcgaaacatgctcactctcctgtgggttattttttcgcttcgacacccgacgcgtctgaacgcagcaggaactgttccgtcgtttgcgggatgtgacgaatcagccagtcggccatttcgcgctcttcggcgaggatcgtctcaatagcgggtatcgaggcggtgtcacccgcttttttggccgccgccagcagggaggtatagcaggcgatttcaaactgttcgaaaacatagccgctgatcgagcccttcacgatttcgtcagaagggaacatgccgccgatggattgtcccagcgccgccattttgctcatcgagtcttttaagaccgaacgagaaatatcattacggtcgaggatttcctccagcaatgtgatttgccgttttgtctcattaatatgttgctcaattctggcgcgaacatcaggataattatcgatacggctggccatggattccagcatagattcggcttgcttttccattgcatgggcatcgcgtagccagtcatggtagtgttctacgtgattcatcattgtatcctcattaggggttcgcttatttggtctcactttcagcagcctgatcggcgcgtgcggcactgtagccagataaatggccgacaatattggcataaatactgatgataatgacccatagcacgctgttcttccaccagatgacggaagggatagcgagaatgaaccatattatcgctgccgctaaatggcaccgtttaattgtcctgggactgatgctcattttatttaacctgtattgccgcgtcatttctgcgctttttggttaatattgccaacggccaggtcggtgagtttaaggtcggtctctttctcttcttccagcgtttcggcaagaagcttaacggcttttttatagccgagctgttctgccagagtggcaagggtaccgtagctggctatttcgtaatgctccactttttgcgcagcggcaattaatgcggcatcacggacttcatttttttccgtgctttcgatgacttcattagcttcttcaattaagccttccattgcgacgcatttcatgcgcttgagcttgatgctgtcttcctgttccacgatctggtcgatacgttcgatctgaccttgcgtctcttcaaggtgtgcggtaaaggcggcgctcagcttctcgctggaggcggcgcgggcaagcttgcttaacgctcgggtaagctgcttttctgcgctgtaggtatccgacagaagatgaataaatacatcctctacgcttttcatattcataattattacgctccggtaaaataaagaaagggtactgcgagcttttcagcccgcagcatgctctctggttttattaaaagagtactaaataagatcaggagttatcagatttacggcctccgccgtgactgttctgtccccctttcttacccgcttcagatgcgcgttgcggatcgtttttaaaattaccaccgctgtgctggccacctttacgtccagcttctgatgctttttcacggtcttcagcgaaattaccggaaccaccacgatgctctgccatattaaacctcatagtcatatattggttatgtcagtacgatacgaaaacattccgtatcactcgtcgttcgagtaataactctagtcgctgtgtgcgatccgtcaaatgcgttttgctatttgcggttgcgttatttttaaatatttgtaaatttgcgcttcgcttgcgttggaaatatggatagacaggaaggacttgtaaacaactgttcagattattcctaactttgagctaaaaatttgaaagctgaggataaaaataatgacgcactcaaattggttgatttgcagccaggggaaaataaaaaatactcctttatagctagaaagcgaaaccataaataattataaggaaaatcctggataaaaagcgccaggcgcgaaagggcggtttcgttaaggcttgttcagaggccagtcgcacacggtttgaccactgtcgtcttaagatcacaaatcagaaatctttccccccggaaggaacgggtttctctacactccaggtaatattcactggaggcatgacatcatggcgaacaccatcacggctgatgacattcgggaacacttttcgcaggctatgtcggcgatgtaccagcaggaagttccgcagtacggcaccttgcttgaactggtagcggacgtaaacctggcggtgctggaaaatgatccactattacatgaacaactggcaaacgccgatgagcttgcgcgtctgaacgtcgagcgtcacggggccatccgcgtcggcagtgcgcaagaactttcaaccctgcgccgtatgtttgccattatggggatgtacccggtcagctattacgatctctcccaggcgggggtgccggtccactcaacggcatttcggccgattgatgatgcggcgctgtgccgtaatccgttccgcatctttacttcgctgctgcgccttgagctgattgaaaacgtcgcgctgcgcgaacgtgcggcggaaattctgtctcaccgaaacatcttcaccccgcgctgtctggcgcttctcgatctgtatgaatcggaagggcagtttaccgtcgagcaggcgcaggagtttgtgcaggaagcgctggaaaccttccgctggcaccgccatgcgacggtcgatcaggagacctatctcgcgctgcataacgagcaccggctgatcgccgatgtggtctgcttcccgggctgccatattaaccacctgacgccgcgcacgctggatattgaccgggtgcaggagctgatgccgaagtacggtattgagccgaaaattttgattgaagggccgccgcgtcgcgaggtgcccgtcctgctgcgtcaaaccagtttcaaggcgctggaagagccggtgctgtttgccggtgaacacaaaggcacccacaccgcgcgcttcggtgagattgagcagcgcggcgtggcgctgaccccgaaaggccgggaactgtacgatagcctccttgcccaggccggcaccggcaaagataacctgacgcaccagctgcatctgcaggagatctttagcgccttccctgacagcgaactgttaatgcgccgtcaggagctggcgtatttccgctaccgtctgacgccagcgggtgaagcgcatcgccatgcgttccggccgggcgacgatccgcagccgctgatcgagcgcggatgggtcgtcgcacagccgatcacctacgaagatttcctcccggtcagcgccgcggggattttccagtccaatctcgggaatgaaacccaggcccgcagccacggtaacgccagccgcgatgcgtttgaagcggccctcggctgcccggtgtatgacgaattttccctctatgaggaggctgaaacgcgcagcaaacagcgttgcggtttgctctgaaagcgttactctgctggggtgtgatggaaaaaataaggtcgttatgcaaaatccttccgcccctgtggttgaaacgcgccagggcgcactgtctggtttaaccgatgaaaatgtccacgtctggtgcggtattccttatgccgcaccgcccgttggcgagtggcgctggcgctccccgaggcatcctgagccgtgggatggcgttcgcgaggccaccgccttttcggcctcaagctggcaaagcagcgaatattgccaggagctgggcgggggcgatcccggtcagttctcggaagactgcctctatctgaacgtctggtctcccacagagcgcgccgggccgcttccggttatggtctggctgcacggcggcggctttaccatcggtgcgggtggcttaccgccctataacggcaaagcgctggccacgcgcggcgtggttgtggtgacgatcaactaccgtctcggtcatcttggtttttttgcccatcccgcgctggaaggcgaggaagatcgcgtggtgcataattttgccctgctggaccagatcgccgccctcgaatgggtaagggacaatatcgccgcatttggtggcgaccccgctaacgtgaccctgtttggcgaatccgcgggcgcgcgcagcgtgctctctctgctggcctctccgcttgcagaaggattgttccacaaggcgattgtgcaaagcgggtataccttgccggacacgccgcgtgaacaggcgctgcaaaaaggggaggcgctggccgcccattttggcctggagaaggcgactgctgaacaactgcgcgccattccgccggaggcgttctggccgctcaccgcgccgctgaacattgctccggcccccatcgtcggggattgcgttctgcctgaagcgatgctggacgtctttttcgccgctcgccagcaccccgtgccggtaatgatcggctcgaacagcgatgaggccagcgtgatggcggtgtttggcatcgatctcgccgggcaaatccagaagcttcgccgggagcgccgcttcgggctggggctgattaagctgctctatccgggcgtcaaaggcgatgaggagctgggcaggcaggtgtgccgcgacatggcgttcaccacgatgggctacgtcgtgatgcaggcgcagcagcgcgtcggcggattgtgctggcgttactggtttgactatgtcgcggaagcggaacatgccacctatatcaacggcgcgtggcacggcaatgaagtgccttacgtctttgataccctcggccaggtggagccttcacgccagtatgtcaacgaacgggatgtgcagtttgctgctcaggtggccgattactgggtgagctttgcgcgagacgcaggacctcgcgagatcctgcccgggccgacgcactggcccgcatgccgtaaagggcgggacgttttattacgcattggcgtgaataaacatgcaggtttcaggcttgaaaaccgctttatgcgcgcccggatgagcctcttcaaacgggtgatgaagcaccacgtcagcctcgattaagcaaacaggcgcgaaacgccgccagcccattttcctcgcctggcgtttcgcgcagcaccagccggtagctcgcgccggtttttatgctggtttcataaggccgcatcagccttcccgcgtggacatcttcggccaccagcgtttcgtcggcaatggcgacgcccagcccctgaatggcggccgtgatggcgagatccatcgtgtcgaagtgttgatttttgtgcatggcaaagcccggaccttcctgtttcgtcagccacagcgaccagtctgtcttatcccttgtcggatgcaggaacgtcagcgatcccagcgctgcacccgcccgcaccgggcttatcaccggggtgagtgcctcttcgaacagcaggtcgcctgcgctcatgtgcgtgccgaacacgatggccgcgtcgtaagattcggttttgaaattgacgttatgatcggtggtggtggtcagggcgatctgcagatccggttgctcacgctccacctccagcaggcgcggcaccagccagcgcatggcgcaggtgggcgccttgagccggatcacggtttgctggctgcgggcctggtcggccacggtcagcaagtgttcgaacgcagactgcagttccgggagcagggcgcagccctgtgaagagaggcgcaggccgcgcgcgtggcgttcaaaaagcggaaagccaaaccaggcctcgagggaggctatcttgcggctcacggccccctgcgtcagacaaagctctgcggcagcatgggtgagattcaggtgacgcgcggtgactaaaaatgcgtcgatggcattgagcgggagcgaacggcgcgacatgaaaacacctcagctatgcatttttctcatggctattatgacaacaattcgattgtcccgacaacagagatgttgtttgaatagttatgcaatgtccatgagaagggaaagaggatgactttacaaacgcctgtgcaaacgcgctccaaactgcccgatgtgggcaccacgatctttaccgttatcggccagctctcggcgcatcataacgcgataaacctttctcagggcgcaccgaatttttcctgcgacccgaagcttgttgcgggcgtcacccgcgcgatggaggcagggcataaccagtacgcgtcgatgaccggcctgcagacgctcaaagagcgcattgccgataaaattgccacgctttacggcacgcagtatgacccgggccgcgaggtgctggtgaccgccagcgccagcgaagggctctactcggcaatcagcgggctggtgcatccgggcgatgaggtgatctattttgagccgtcatttgacagctacgcgccgattgtccgcctgcagggggcaacgccggttgccatcaggctcaccgtgccggattttgccgtcaactgggacgaggttcgcgccgcgatcaccccgcgcacgcgcatgatcatcatcaatacgccgcacaacccgagcggtcaggtcttctccgccgacgatctgcaacagctggcggcgctgacccgcaatactgacatcattattttgtctgacgaagtgtacgaacacgtggtgtttgacggtgagccgcaccacgggatggctacgcacccgcagctggcggagcgtagcgtgattatttcttctttcggaaaaacgtatcacgtcaccggctggcgcgtgggttactgtgttgcaccggtggtactgatggacgagatttgtaaagtccatcaatttttaatgttctctgccgatacgccaatgcagcacgcgtttgctgaacatatggtcgacccgcaaacctggctgtcgctgtcggcgttttaccagcgcaagcgcgatctgctgcagagtctgctggccgattcgccgtttacgctgctgccaagcgccggctcgttcttcatgctggcggactacagccagttcagcgacgagcgcgacagcgagctggtgaaacggctgatcgttgagtacggtgtagccaccattccgctgtcggcgttttatgcggacggtacggataataaattgattcgtctctcttttgcgaaagatgaggcgacgttacgggcaggtgcccaggccctgtgtcgggttaaaccacgctaaggagtttgagatgaaattacgcgcgctagttgtcggcatgggattgctgtgtaccttttcctccttcgcagcgtccgagctgcgttacggtctggaagccgaatatccgccgtttgaaagccgcaatgcggcaggcgaactggaagggtttgacgttgagctggggaatgccatctgcaaagcggcagcgctgaagtgcagctgggtggaaacctcgtttgatgcgctgatcccggggctggtggcgaagaaattcgacgccatcaactcggcgatgaatatcaccgagcagcgccgcaagagcattgattttacccagccgatctaccgtattccgtcgcagctggtcggcaaggccggtacggcagtcgaggcgacgcctgaagggctgaagggcaaaaccatcggcgtgctgcaggggtcgattcaggaaacctatgccaaagagcactgggaaaagcagggtgtcaccgtggtgtcgtataaagatcagaatatggcctggggcgatctgctgaatggccgtatcgacgcctcgctggtcatgtccgcggccgggcaggcaggtttcctcagcaagccgcagggaaaagggtttggcttcatcggcaaaccggtgtctgacgacaccatcctcggcagcgggatcggttttggggtgcgcaaaggtgatgaggccaccaaaaagcagcttgatgccgcaattgataaggtacgtgccgacggcacgatcgccaaactcgctgataagtacttcccgggtatcgatgtcagcgtaaaataaccgcctcattggccccgtcagctgatgtcctgacggggcatttttatacacattttccaggctttctttacaccactttcgggccgttctggtcgacagaaaatatttctcactttgttcatataatcaccggccaacaattggattcttaaccatttttgtttaggctgtgcgttctttcttgccgtcatttcgccgagcgcggaacacattcacacgaccataaggacgtttttccaggcatgaatcgcagacgttttctaaaaggctcgctggcagtggcagccctgagcggcacatccggccttgcttccctgttttccaaagcggcatacgctgccgactctgacattgctgacggccagagccgtcgttttgacttctccgtactgcaatccatggcgcatgacctggcgaaaaccccgtggggtggcgcgccgcgtccgctgccggagacgctggcaaccatgacgccgcaggcgtacaacgccatccgctacgacgaaaagcagtctctgtggaacaacattgaagggcgtcagctggacgtgcagttcttccatatgggaatgggattccgccgccgcgtgcggatgttctcgctggaccagtcgacctctatggcgcgcgagatccacttccgtcctgagctgttcagctacggtgaaacgggcgtggataccaaacagctggaagggcaaagcgatctcggctttgcgggcttccgcgcgtttaaggcgccggagctggcgcgtcgcgatatcgtctctttcctgggggccagctatttccgcgcggtggacgacacctaccagtacggcctttccgcccgcggtctggcggtagacacctttaccgacacgccggaagagttcccggactttaccgccttctggtttgaaaccgtcaagcccggcgacaccacctttaccgtctatacgctgctcgacagcccgagcatcaccggcgcctataagttcgtgatccactgcgagaagagccaggtgatcatggaggtggaaaaccacctctatgcgcgtaaggacatcaagcagctcggcattgcgccgatgaccagcatgttcagctgcggcaataacgaacgccgcatgtgcgacaccattcacccgcaaattcacgactccgaccgcctggcgatgtggcgcggcaacggggagtggatttgtcgtccgctgaacaacccgcagaagctgcagttcaacgcctatatggataaaaacccgaaagggttcgggctgctgcagctcgatcgcgatttctcgcactatcaggacgtgatggggtggtacaacaagcgcccaagcctgtgggtggaaccgcgtaacgactggggtaaaggcgcggttggcctgatggagatcccgaccaccggcgaaacgctggataacgtggtctgcttctggcagccggaaaaagcggtaaaagcgggcgacgagctggacttcaaatatcgcctctactggagcgcgatgccgccggtgcgctccccgttggcgaacgtttatgcgacccgcaccggcatgggcggcttcccggaaggctgggctccaggggaaaactacccgaaagtgtgggcccgtcgctttgcgattgatttcgtcggtggcgacctgaaggccgctgcgccaaaaggcatcgagccggtgattacgctctccagcggtgaagcgaagcaggtagagatcctctacgttgagccgtttgacggctatcgcattctgtttgactggtacccgacgtcggattcgacggagccggtggatatgcgcctgttcctgcgctgtcagggcgacgccatcagtgaaacctggctgtatcagtatttcccgccggcgccggataaacgtcagtacgttgacgacagggtaatgcgttaacccttgtgggattgtgccgggtggcggcttcgccttacccggcctacagtttcgaaacgtaggccgggtaagcgctagcgccacccggcaattgagaggcaccatgtcttcagaaatcatccccgtcacccaggatatcgaacttcgcgccgtcgaggagcgctacaccgccgacctgcacaatctcgttgttaaaaacagagcctttctgcaaaccgcctttgactgggcgcagcacgtgggcagcgaagaggacacccgccgtaacgtgcagagcaaccagatgctgcatcagcgcggctacgccaaaatgtttttgattttcaaggatgatgcgctggttggcgtcctgtcgttcaacaccattgaaccgacgaacaaagccggctacatcggctactggctggatgaagcccaccaggggcagggcattctctctcagtcactgcaggcgtttatgcgctactacgctgaacgcggtgagatccgccgttttgtgatcaagtgtcgggtggcgaatcagcacagcaacagcgttgccgtgcgcaacggttttacgctggaagggtgcctgcgggaagcggaatacctgaatggccgctttgacgacgtgaatatctacggcaggatttataccctataacgcacccagcagcggcgtgcgggtgatgcgctggtcgccgtttatcactttttcgccgcgcagatgaatgctctcgccagcaaacgcttctatgaccgcatcgtcggtgatttcaacccgatgctcgataagcacatccccgctgattcgcgcgcgcccctggatcaccactttatcatccagcatgatcggcccgccgcgcagccatgcgtgaccgccaatcaggacgtgatgcttgatgacgcagttgccttcaaccacggcattctccgtaatctgcgagctgtagcgcaccgtcgggatggcatcgtcgtcgaaaccggctatcacgcgggcgttgccgtagactttcgcacagtcgcacacccagacgttgttgagttcgttaccctcgaggatcgcgttgtcgaagacttcggcccggtgttcaacgaaggcaaaattaaccatcgcctcgccgtagatttgcgcctggtgcacaatgcgcgactggctcaccgtcgcgttatcgtagatttggaggatctgttcatgattcggcgtcagccctttggcggcaatgaccacgctgtgatgcagcacgcgcgcgtcgccgtagatatggcactcgccccgtacgcaggattgctgaatggtgacgttgtcacttattcgcgccccgtgactgacctccgcgccgtccagccagcagctgccgccgatatgcgcgtcatggctaatgatgcatggaagggtaagacgcgcgttgccggatacggttgccccggcgaacaccacgctgttttcatcgtagatccagcagtcgccgtcctgtgcgagggcgcgctcatcgtcaatccagccgcctctcgtgccgaccgtcacgtcgttaaagtccgccgtggcgataatctgccgcagcgtggtggcgtgggtggtttcgccgtttttccattgccagaggcgggtttcatcgctgagccggtactttttcatcgtttgatctctggtaagcatctcaactaaacgtagcaaattttcggcttttcgttttgctggcatccgctgcagaaaccgcttaaaatggcatttaaaatacattttaaaaattaaaataaatgaataaatttaacaaaccccaacaggtacttaacttgcccgcagggtattttggcatggtgcttggcatcatcgggatgggtttcgcctggcgatacgccagcaccctctggccagtgacgcgttggccgggtgagggcctcgtagcccttgcggtgatatgctggtttcttttaacggtcgcgtttgtgacgcgcgcgatccgtttcccccgcagcgtgctggcagagatgcgacacccggtgatgagcagttttgtcagccttttcccggccaccacgatgctggtcgccatcggctttgtcccctggtgtcgcgcggtgtcactggcattgtttggcattggcgtggtggtgcagcttgcatactccgcctggcaaagcgccgggttatggcgcgggaaacatccgcaagaggcgaccacgcctggattatatctgcctacggtggcgaataattttatcagcgcgatggcatgcggtgccctgggcttcaacgatgcagggttagtcttccttggcgcaggcgtcttttcctggctcagcctggaaccggttattcttcagcgtcttcgtagtgcaggagaactgccctccgcactgcgtacttcattgggtattcaactggcgcccgcgctggtggcatgtagcgcctggttcagcgtaaatggcggtcaggcggatacgtttgcgaaaatgctgttcggctatggtctgctgcagctgctatttatgctccgcctgatgccatggtatttgtcccagccgttcaatgcctcattctggagtttttcctttggcgtatcggccctggcaaccacgggtctgcatctgggacaaagcagtccgacgggcttttttcacgccattgccgtgccgctgtttatcttcaccaacgcgattattgggtggctgttggtgcgtacattgattctgctgcttcagggcaaacttctggttcgtgctgataaagcgcagcttatgcaatccgaggaacaataatgaccgtcgatgagaattacttcactgagaaatatggcttaacgcgtacccattcagaagtgctgtacagcgcggagatcgtgaaacccggtaaaacgctggatctgggctgcggcaacggccgtaacagcctttatcttgcagccaacggctacgatgtcaccgcgtgggacaagaacccgatgagcatcgacaatatcgagcgcatcaaggcggaagaagggatcgctaatctgcataccgcgattaaggatctgaacaacctgagctttgacggccagtacgattttattctctccaccgtggtgctgatgttcctggaggcaaaaaccatcccgggccttatcgccaatatgcagcgctgcacgacgccgggcggttacaatctgattgttgccgccatggatacggcagactacccctgcacggtcggcttcccgtttgcgttcaggagcggtgagctgagcaactactacgaaggctgggaattgctcaaatacaacgaggacgttggcgaactgcaccgcactgatgaaaacggcaaccgcatcaagctgcgctttgccacgatgctggcacgaaagcccgcttaacgggcggcgagcaggcagatctgcagggcagtcttataagacgcctcaaacgacgacagcggcaggaattcaaacttcgagtggaagttatgcgccccggtgaagaagttcggggtgagtagccctttagccgagagcgccgcgccgtcggtgccgccgcgcatcggcgtcggtttcggcgtgatgccgagcgattccatcgcctcgaacatcagatcgatggcacgccggtcttcgccaatcgcattgctgatattgctgtaggtatcttcaatgcgatagtccactttggccgtcggatattgggcggcaatcagcgcggctacgtcggcaatctgctgcttgcgcgcggcaaagcgctccttgtcaaagtcgcggatattggccttaagaacggcctcgttctgtccggcctgaatgccgttaaaccagatatagccttcacgtccctcggtgcactcgggcgtttgctggcggtcaaaatggctgatgtaatcagtcgccatcagcaggggattcaccagcacgcctttcgcggacatcggatgcgccgtcacgccggtaaagcggatttcagcggctgccgcattaaagttttcgtagacaatttcccccagctcgcagcagtcgatagtccaggcgaagtcgacgtcaaagcgcttaagatcgagcgccttggcaccgttcaggccgatctcttcgtcaggcacaaacgccacgacgatatccccatgctgatgttccgccgtcaggttttccagcaccgtcatgaccaccgtgacggccgatttattatcggcgcccaatacgctggttccgtcgctgaaaataatctcctcgttcggataagccagaatttcagggtgctcctctacccgcagccagatgtctttctctttattcagacagagatcttcaccggtaaacgttaatatttgtggatgaatatccggtgaaagtcccacgtcgacggtatcaatatgggtaataaagccgatgcgcggcgcaccgggcacgttgcctttttttaccgccgttaccgtggcaaattcatcaatcacaatatcgtctaaccccagctgtgccagctcctgcgccagctcgcgcgccatgtcatgctggcccggcgttgagggcagggttttgactctgggatcgctctggctggtgatcgcgagatagcggaaaaaacggtgcgttaattgtctggaaagcggcgagcccatagtgatttattccttatttatttttcaggtgtttgccacatcactttaatgttatttatgaaatggcaaaagaattaattagccgtcgaattaaaaagacaggaataaatgatgacaagcaaactcacaactttcacgctggcgctcgcggcactcacggtcagttccgctgtcgctgcgaaaacgctggtgtattgctccgaaggatcgccggaaaactttaaccctcagctttacacctcaggaaccagcgtcgacgccagcgccgtgccggtctataaccgtctggtcgatttcaaacccggcaccacggagctggtgccgagcctggcggagcgctgggaggtgagcgacgacggtaaggtttacactttccatctgcgtcagggcgtgaaattccagagcaataaatccttcacgccgacccgtgactttaacgccgacgacgtgatcttctcgtttatgcggcaaaaagacgtgaatcatccctaccacaacgtctctaacggcagctattccaacttcgaaagcctggagttcggcagcctgataaccgccattgataaagtcgatgaccacaccgtgcgctttaccctggcgcacccggaagcgccgtttgtcgccgatctggcctggtattttgcctcaatcctttcggcggagtatgccgacgcgatgctgaaagcgggcacgccggagaaggtggatatggagcccatcggcaccgggccgtttaagctggcgcagtatcagaaggattcccggatcctgttcacggcgtttgccgactactggcaggggaaatcgaagctggacaggctggtgtttagcatcaccccggatgcctccgtgcgttttgccaaaattgagaagaacgaatgtcaggtgatgccgttcccgaatccggccgatctgccgcgcatgaaggccaataaagatatcaacctgatgagcaaagccggactgaataccggcttcctggcgttcaacacgcagaagccgccgctggataacgtgaaggtccgtcaggcgctggcgatggccatcaacaaaccggccattattgatgcggtgttccacggtaccggaacggcggcgaagaacctgctgccgccgggcgtctggagcgccgacagcgagcttaaggattacgactacgatcctgaaaaagccaaagcgctgctgaaagaggccggctttgccagcggcgtcagcatcgatttatgggcgatgccggtccagcgtccctataacccaaatgcgaaacgcatggcggagatgattcaggcggactgggcgaaaattggcgtacagaccaaaatcgttacctacgagtggggcgaataccttaagcgtgtgaagggcggggaacatcaggctgcgttgatgggctggacgaccgtaacgggcgatcctgacaacttctttggtccgctgtttacctgcacctcggcaaacggtggatcaaattcggcgaaatggtgctataagccgtttgataagatcgttgctgaagccaaatcgataaccgatcatgataaacgggtggcgctgtataaacaggctcagcagatgatgcatgaccagatgcctgcggtgatgattgcgcattcaacgattttcgaaccggtgcgcaaggaggtgaagggctatgaaatcgacccgtttggcaaacatctgttctggcaagtggatataaatcagtaatttttcactgcccggcatgcgtccgggcaatctttttgcaatttgtgctcccggcatcattttttgtcacaacaaacccgccagacttttgctataacttcaaatgcatacttgcagataacatggaaaactatcatgcgtactcaaactttttttaaagttgcagtgcttactggtctgttggcgttggcgggctgttcttcaaaagtcgccgctccggaacaatactccggctttttaaaagattattcaggcttacagcaaacgacctcggcgacgggaaaaccaacgctgcgttgggtcgatccttcgtataacgaagccaattacgacagcattctctggacgccaattacctattatccaacgccaaaacccaccacgcaaattgggcaaaaaacgcttgatgagttgttgaattacaccaataacaaaatgaaaacggcgattggtacgcgtaagccagttgtcaccacgccgggtaaacacagcctgattttccgtggcgcgattaccggggtgagttcgcagaaagaggggctgcagttctatgaagtggtgcctgttgcgctggtggttgccgggacgcagatggcaaccggacaccgcaccatggatacgcatctcttctttgaaggcgagctgatcgatgcggccaccaacaaaccggttatgaaggtggtacgtaaaggcgaaggtaaagagctgaataacgaaaacacaccaatgacctttgcgacgctgaagcaggttgttgatgacatggcgacggacgccaccatgtttgatgtgaaaaagaccgcgaaataaaataaaacggcctgcgtaatgcaggccgttttatttatgccatccgtaagcgtctgaaccaggtttccggtttggtaaacatcaccatatttcctcccagaatcagcactaatcccacgataccgttgacatgccagacgtagccttcatagaccgtggagatggagagcgccaccagcgggaagagcagcgtgctgtaggccgctttgcccgggccaatacgtcccaccagcgtgaagtaggcgccaaaagcaatcaccgagccaaacagggccagatacaccagcgcgccgagatagctcaccgtccattccggcacaaagctatcgcctctgaacagcgcaatgcagcccatcaccagcgtgccatagagcatcgcccaggcgttggtggtcatggtttccaggcctctgcgctgatggcgcatgctgatcatattgcccagcgagaacccatacgtgccgagtgcggaaagcccaatgccggtcaggagtgacgcgctccagccgctggccagcaggtcgtcccagaagagggtgatgatcccgaccagccccagtgccgccgccgtccagaatcgcgcgggcgggcgctgtccgaagaaaataaagctgttaatggcgttatagagtaccgccatggagaagatcaccgactccagcccggtattgatatgtgccgctgccgtgtaaaaacaccagaagttaaagcagaaaacacagcatccctgaagcaggcaaaaaagatgatcccgcagcgccagcgtgcgcaggcgacgcagggcgagtaacaccaccatcatggtgaggctggcgacggcgaagcgccagaaaatcgacaccggcgccgcgacggggccctgctgcaggaaaatcgcaatccaggtggttccccagataatgaccacgagtccgtataataatgcgttcatagttgtctcttcttaaaccgcggaagcccgcagtatgacgctgagatgcgtaacgggctttcacccgcttgcggcagacttgcaaaatcttgcgcttttttcttctgaagggactggcaacgggcaacaactcttcttagactgatattccgattcttcacgcgctaacggttatgtctcacgcttacgatacctttgaaacgctttgccaacagaatgcagtcctgcgggaaaccgtctcgctgaattcgggtattcagctggccgcgtggtacaacaagcacgacacgatcaccgtaaagagcaaccatcataccctcagcctgtacgtggcggacggctacgaaagctatcaaaaaacgccaggaggctggaagaacggcggggggccggaccgtttctgcctgatgcccaaagagagcgaatcgacgtgggatatccgcgatgacctgtcgtttgtgcatctctactgcaccgatgaacacctgcgcgacgtgggagaaaaaatctgggataagcggccgctttcgctgaccctggacgagcgtatttttggcagcgacccgaagatcaccacgctgtatcgccagtttttactgggctgtgactggcagcagcacgccaaccagctcaccctgagcacggcctccacgctgctgctgacccatctgctgcaaaactactcaaacgtgcagtggaagctgccggtcgttacgggcgggttatcgccgttcgtgctgcgcaacgtcctcgcctttatcgaagagaacctcgggcagcccctgacgctggccgagctggcggcgcaggccgcgctcagcgaataccactttgcccgcatgttccgccagtcgacggggctggcaccgcatcagtacgtgatgcacaggcgaatggtcaaagcgaaagagctggtgcagcatacctccatgccactgacggacattgcgctggcctgcgggtttaactccgccagccacttcagcaaccgctttcgcagcgcgacgggcatgacgccgtcgcagctacgcgcggcgagcgcgtgaaaacagggcgtaacataccccgcccagcaccagcccccagaacgccgaaccgatgtccaggatcgtgacgccgcttgcggtcgtcagaaacgtgacgatggccgcgtcgcgctccgcttcgtgactcagcgcctggtataaactcccgctgatggtgcccagcagcgccagaccggcgagcgtctggatccagctgagcggcagggcggccatcagcccggtaatggagccaccgaaaattcccgccagcagataaaacccgccggctgcgatggctgccagccagcgtttttccgcgtccggatgtgcgtccgggctttgacaaatggcggcagtaatggccgcaatgcagatagaaaagacgccaaacggagaaaacagcagcgccagtccacccgtcacgatgatgagcggtgaggccgccagcgggtagccggaggctttcatggtggcgaaacccggtgcattttgcgaggccatggtcacgaggaagaagggcaagccaatactcaccaggctggtgaaggtgaagtcaggcgcaataaagtcgggcatcaccagagaaagggtgagcttatccgtgacaacgtcaccaccggcccaggccacgataccgcccaccagcagcgtgaccacgatggcatagcgcggcgacaacgcttttgcgatcagccatgccgcaatcatgctgccgcacagcagaaagtgcccctcaagatgcgcaaacgcgtgcaggccaaactgcagcagtaccccggcgagcatggcggcagcaagcgaatgggggatcagcgtcatcagacgggcgaaaagcccggtgatgccgcagagcaaaataagcgcgttggcaaagatgaacacgccgatggtttccgccagcgtgacgccgtgcaggctggtggcgagcagcgccgcgccgggcgttgaccaggcggtcagcacgggcgctttgtaccaccatgaaagcaccagcgtgctgacgcccatcccaatccccagcgcggtcatccagcctgcgatctgctgcgcgctggcgccagccgcggcggcggcctgccagatgatggcggccgagctggcgtaacccaccagaacggcgacaaatccagccagtacgaccggaacaagatgagaggaagggcgcatgaaaactccgttgtgcgttataacgtccggagtaaggtaacactgtgcgttatagcgtacaagtggtatgctcgtcgtcaggaggaaatatggacatcacacaacaccttgcagcaacactgaaaacattacgccaggcacggggctggagcctgtcgaagctggcggacgaaaccggcgtatcaaaggccatgctcgggcaaatcgagcgaaatgaatccagccccacggtgtcgacgctgtggaaaattgccacgggactgaacgtgccgttttccgccttcatcacaccggaggcggaccggcaggcggtgtttgacccgcagcagcaggcgatggtcgtcaagccgctcttttcgtgggacgaggcgctccggtttgattatttctccattaccctggcccccggcgccctgagtgaatccacgccgcatgaggcgggggtgattgaacatgtggtggtggtcagcggcgagctggagatgaagctcgagggcaaatggcagacgatttctgccgattccggcgtccgttttgccggcgataaaccgcacgcctaccgcaacagcagcgaccggacggtgcattttcactccctcattcattatccccgctgaggctacgcaaaactgtttcgctgacgcagacttctgactacaataaccgccattttgaccataacggataacgacgaagtatgcgcctgcaatcccatcatcttgaacttttaagcccggcccgtgacgccgccattgcccgtgaagcgatccttcatggcgcagatgccgtctacattggcggcccgggcttcggtgcccgccataacgccagcaacagcctgagcgatattgctgagctggtgccgttcgcccaccgtttcggggcgaaggtgttcgtcaccctgaacaccattcttcatgatgatgagctggagcctgcgcaacgtctgattaccgatctctatcaggccggggtggatgccctgatcgttcaggatatgggcgtgctggagctggatattccgcccattgagctgcacgccagtacccagtgtgatatccgcacggtagagaaggcgaagttcctctccgacgtcggcttttcgcagatcgttctggcgcgcgagctgaacctgaatcaaatccgcgatattcaccaggcgacagacgcgacgattgaattcttcatccacggcgcgctgtgcgtggcctattccggccagtgcaacatttcgcacgcgcagacgggccgcagcgccaaccgcggcgactgctctcaggcctgccgtctgccgtataccctgaaagacgaccagggccgcgtggtggcatttgaaaaacacctgctctcgatgaaggataacgaccagaccgccaacctgggcgcgctgatcgacgcgggcgttcgttccttcaagattgaagggcgctataaagatatgagctacgtgaagaacatcaccgcgcactatcgccagatactggacgccatcatcgaagatcgcggtgacctggcgcgcgcgtcggccggtcgtaccgagcatttctttattccgtcgacggacaaaacgttccaccgcggcagcacggactatttcgtgaatgcccgtaaaggggatatcggcgcgtttgactcaccgaagtttatcggtttgccggtgggggaagtgctgaaagtggcgaaagatcaccttgatgttgcggtgacggagccgctggcgaacggcgatggccttaacgtgatgattaagcgtgaggtcgtgggcttccgcgccaacacggtggagaaaaccggtgagaaccgctaccgcgtatggccgaacgaaatgccggccgatctctacaaggcgcggccgaacgcggcgcttaaccgtaacctcgatcataactggcagcaggcgctgctaaaaacctccagcgagcgtcgtatcgcggtggatattgaactgggcggctgggaagagcagctgattctgaccatgacctgtgaagacggcatcagcgtaacgcatacgcttgatggcctgttcgaggtggcaaacaacgcggagaaagcgcgcaacagcctgaaggatggcgtcgcgaagctggggcagacgatttactacgcccgcaacgttgaggtcaatctgccggatgccctgtttgtgccgaacagtttgctcaaccagttccgccgtgaaaccgccgagatgctggatgacgcgcgcctggcgaactacccgcgcgctagccgtaaagcggaaaccgttcctgcgcccgtctacccggatacgcatttatccttcctcgccaacgtctacaaccataaagcgcgtgaattctatcatcgccacggcgtgcagctgatcgacgcggcttatgaggcgcatgaagagaagggcgatgtgccggtgatgatcaccaaacactgccttcgtttcgcgtttaacctgtgtcctaagcaggcgaaaggcaacatcaagagctggaaggccacgcctatgcagctcgtaaacggtgacgaagtgctgaccctcaaatttgactgccgtccgtgcgaaatgcatgtgattggcaagatgaaaaaccacatcttcaaaatgccgcagcccggcagtgttgtggcgtccgtcagcccggacgatctgatgaaaaccctgccaaaacgcaagggcagctaactaccgaacgtgcgtgtccggtttgcgcgatttctgccacaggtggtgttcgcgcaaaccctccgccgactcctccgccgcgcttcgcaattcatcgctatcggcttcatgacgcagctgatgatccacattctttacccacagatattcatgtcctttgtgcccggccataagctggcctgaaaagagggcacagataagcatcacgagagataaaccttttttaaccatgaggtcaccgccgaataacgttgcggcttaatgatgccgattatttattattgttattattcaaatattcaaactagcgcaaagagaatgtcaaataatgtacgttcttaataaggcttaagacttttcctaaagtacatatatgtatggtaaatgttccatttcttgaccaaagttggatatttgcattaaggacaaatcctatataatagagaatctctggctaaggaatgggtcattactaaatgaaaaaaataatagcacttgcgcttctggcggttgcgatcggggctgttgtgggaattcgttatgcagctaatgacgaaccagaatatattcaatcagcagaaattcgcgttggttcatatttaaccagcgactatggcgttgttgcctgcggcagcaaaaaagttaacgatctgcgctgggaattagattgtactcatcaagagggaggaaaaacattccagtttgcggtgtttccctctgaaaatgcaccttatggcgtagcgcgatccttttatcttgaagccattaatgatgatgcaaaacagagcgctgaacaggggcttatgcgttatttgcagatcaatacccatgcaggttaataaaactgtttaaccttcgttaagacaacgagtgttaggttgtatgggatccgctgtccggccatggagtgtcgggacgtagagaccaaaatacaaatctatccatgcaagcatttaccgccattttttggcggtttttttttgcgcataacgtagcggtgttggccgtggggttatggcgtcacccgatagtgcgactgcaccagacccgaagggaagctgcggctggagaccagcgtcaaatcgatatccccgggaagggcgccaaacagcgattttcccgaaccgagcaggacaggaacggttgtgatcaccatatcggccaccagtccttctcgcaggaacgactgtatgacttgcccaccatcgagatagacgcgacgggcgttctgcctcgccagatcgtcgagcacctcctttggcgtgcggccggaaaactgtactttgcccctcagcgcgtcgggtacgggcgtgtcggccagctgtcgggagagcaccagcacgggcctgtcataaggccatgtctcaaaggtccgcaccttctcatagctcccccggcccatcacgatccagtctttgtccgcgatgaaagccgtgtagccatgatcctcattcgggtcatcgcgctgcagcagccagtcgatatcatcattgtgtcgggcgatgtagccatcaagactggttgcgataaaaacgtgtgtggtgaccatcaggttctccgtattccagcaaaaccaaaagactgacgcctcagcgggcagtaccggcatgagaaaattgtttacggtactgggccggggaaatcgcgaactgctggcgaaaatgatgacgcagcgtcgatgcctgaccaaacccggtttgttccgcgatgctgtcgatgcttaaacgactgctttccagataatctttcgcccgcagcaggcgctcattgagtaaccagcgggcaggcgtcgttcccgttgccgcttcgaagcgacgcagaaacgtgcgctgactcataccgacacgacgcgccagcgagtcgacgctgtgcggctcggtaagatgcgtgtgcagaaaatcaaacagctgaccgaggcgctggctttcccgcagctgcgctaccgggcggctcagctgttgcggctgagatccatcccggtgagggggaatgacaagccgcctcgccacgctgttggcggtttccatcccgaaatcccgacgcacgacgtgcagacagagatcgatccccgccgcgctgcctgcggaagtcaggatctcgccttcgtcctggtagagcacatcctcgaccacgtcgatgtcagggtagcgggctttaagcgtctcaatgtaacgccagtgcgtcgtggctttgcgtccgttgagcagaccggaggcggccagcacaaacacgcccgagcagatggagagtagctgacagccccgcgcgctggcctgacgtaatgcgttgcagagcgcgtccgggaccggcgagtccaccccccgccagcccggtaccacgatcagatcggcagacgcaagcagggagagatcgccatcggtaatgatgcggatcccgcctgtcgcccgaagctcaccgtcatcaacgcttgccacggcaaaacgataccagtcgtcacccagctcgggccgcggcaggccgaagatttccaccgccaccccaaactcaaaggtacacagaccgtcatacgccagcaccaccaccttcgggcgggcaatctgtcttaacgttgtcatctttttgctgttttctggcataagcgagcgcattcatgagctgaatttgtagatagagtagtgttaacacaaacgccaaagatgaggaaggatcatgagctatgttactgaattcccggccgccgaaccgcaggaagccgttacccattttctgcgtcgcctgagcgtcgaaaccgactgcgccgatgtgcatcatgccatcacgcataatgagcaggactttgttttgctgcacgtggtggggagcccggagcagtttgcccgtcgccatgtgccgggcgctctgcatatgccgtggagccagatgaccgctgagcgcatggcccaatggcctgaagggacgctgtttgtcgtctactgcgcagggccgcactgtaacggcgcggacagagccgcgctgaagctggcgcgtctcgggctgccggtcaaaatcatgctcggcggcatcaccggctgggaagatgaacgctacgcgtttgccagcgaggcgtccgtcgccgcgctgtgatgatgaatttttttcaacacccgtgaaattttctcgtttgccggcaccggtgaggtatgacattgtttttggacatttagacatccagaagtccaaagcttcaaataatgaattatcactgcgggcaattatcgccggcagactgaggagatttccatgcaacgacaccacgccccgtaccgcgccgacgtagtcggcagttttttacgcccggatgccatcaagcaggctcgcctgaaatttgccagcggtgagattgatgccgggcagcttcgcgcggtggaggacgaggccattcgccacgtcgtcgagcagcagtgtgcgtgcggcctgcatgtggtgaccgacggtgagtttcgccgtgcctggtggcacttcgacttcttcgacggtcttcagggcgttgagcgttacgattcccagcagggcatccagtttaacggcgtgcaaaccaaagcccacggcgtgcgcgtcaccggcaagctgggctttggcgagcacccgatgctggacgatttccgctatctgaaaagcatcagcggtaacgcccagccaaaaatgaccattccgagcccaagcgtgctgcacttccgcggcggtcgcaaagacattgatgcgaccgtgtatccgaaccttgacgtctatttcgatgacctggcgaccacgtggcgcgatgccatccgggccttctacgacgcgggctgccgttatctgcagctggatgacaccgtctgggcctatctctgttcggacgaccagcgccgtcagatccgcgagcgcggcgacgacgccgatgagctggcgcgcatctatgcccgcgtgctgaacaaggcgctggagggcaagccggacgatctgaccatcggactgcacgtctgtcgcggcaatttccgttccacctggatttccgaaggcggctacgagccggtagcggaagtgctgttcggaacggtcaacgtggacgccttcttcctcgaatatgataacgaccgcagcggggatttcgcgcccctgcgctttgttcgcccgggcaaacagcaggtggtgttgggtcttatcactacaaaaaacggcgagctggagaatccggagggaattaaagcccgtcttgaagaggcggcgaaatacgtggcgaaagagcagatttgcctcagcccgcagtgcggttttgcctcgaccgaagagggcaacagcctgagcgaagcccagcagtgggacaaagtccggctggtcacgcagatcgccagcgaagtctggtaaccccgttatacggcgctgcattataaaagtgcagcgctgtaccattctgagtcgttctctttacatccggcgttcccctcccagaaatagcgctatctccattctggcactctttttgctcctgcttcgctgacactttttttccgcgtccacgccgtaccggacgttttcgcacagcgttctttttcaggagtgaaaatatgcagcgtcgtaccttattaaaagcttttgcgttatccgcgtccgtcgtggcgatggggatgagttttggcgcgcaggcggccgataccatcaaggtggggatcatgcattcgctgtccggcaccatggccatctccgaaaccccgctgaaagacgtcgcgctgatgaccatcgatgagatcaacgccaaaggcggcgtgctgggcaagaaactggagccggtggtggtggatccggcctcaaactggccgctgtttgccgagaaggcccgtcagctgctgagccaggataaagtagcggtggtattcggctgctggacgtcggtgtcgcgcaaatccgtactgccggttttcgaggagctgaacggcctgctgttctatccggtgcagtatgaaggcgaggagatgtcgccaaacgtcttctataccggcgcggcgccgaaccagcaggctatcccggcggtggaatacctgatgagtgaagacggcggcgcggcgaagcgcttcttcctgctgggtaccgattacgtttacccgcgcaccaccaacaagatcctgcgcgcgttcctgcattcgaaaggggtggaggataaggacatcgaagaggtttataccccgtttggccatagcgactaccagaccatcgtcgccaacatcaaaaaattctccgcgggcggcaaaaccgccgtggtgtcgaccatcaacggcgactccaacgtgccgttctacaaagagctggctaaccaggggctgaaggcgacggacgtgccggtggtggcgttctccgtgggtgaagaagagctgcgcgggatcgacaccaaaccgctggtgggtaacctggcagcctggaactactttgagtccgtggataacccgactaaccaggcgtttgtagcggattacaaagcctatgcgaaggcacacaagctgccgaacgccgataccgtcgtaactaacgatccgatggaagccacctacgtaggtattcacatgtgggcgcaggcggtggagaaagcaggcactaccgatgtggacaaagtgcgtgcggcgatggccggtcagtcctttaaggcgccgtcaggctttacgctcaccatggatgccaccaaccatcatctgcataagccggtcatgatcggtgaaatcgaaggcaacggtcagttcaacgtggtgtggcagaccgaacagccggtacgcgcccagccgtggagcccgttcatcgccgggaatgataaaaaacccgaccagccgatgaaaaccgccagcaactaagccatcaccgcagggagaaacgtcatgaacgccatgcgcctgttcatcgctcttgtatggctttccggactgctgccagggatggtgcaggcatcggatgccgatcgttttgttgccgccagccgcagccagcaggcggatttgttgacgcagtgggccgccgcgccggatgcgtcaagactgccgctccttgaggcgctacaaaaggaaaatctctacgtcgatacgcaaaagcacgcctttgcacaacgcgatggcaacgtcatcccgctgggggacagtcagacggcagagggcccaaccaaagccgtgcgcctgacgaaccggctgcgcgtgctggctgcaaccgctatcgccacgcatcagctggtgagtgacagtgtcaccgaaaggcgggcggcggcgcgtcagctgcagcgcgatgcccagcccgggatgctcgcttttctggaaaagcgtgtgaacgatgagacggacgccgtggcgcgtcaggcgctgctgctggcggtcgcgaatctccagctggccagcccgcagccggaagtgcgtcgcaaggccgtcgaattgttaggccagtcagacgatccggacgtgcagtccaggcttaccccgtttacccagccacagacggagccggatagcgcggtgcgcgcggccgcagaagagagtcttagccagatccagcatcggctgatgtggggcgacctgctgggccaggcgtttatggggctctccctcgggtcggtgctgctgctggccgcgctgggtctggctatcacctacggcctgctgggggtgattaacatggcccacggcgagatgctgatgctgggggcatatgccacctggatggtgcagcaggcgatggccgggcttgcgccccagtggctggcgctctatcccgttatcgccttgccggtcgcgttctgcctgacggcgggcattggaatggtgctggagcgcacggtgatccgtcatctgtacggtcgtccgctggaaacgctgctggcgacgtggggcatcagcctgatgcttatccagctggtgcgcatgacctttggcgcccagaacctggaggtggcgaacccggcatggctctccggcggggtgcaggtttttgctaacctgacgctgccgtggaaccgcatcgtggtgctgggcttcgtgctgctggtgctgttctttacctggctcattctgaataaaacccgtctggggcttaacgtgcgggcggtgacgcaaaaccgcagcatggccgcctgctgcggggtaccgacagggcgcgtcgatatgctggcgtttgggcttggctccgggattgcggggttaggcggcgtggcgctatcgcagctcggtaacgtcgggcctgagctgggccagggctatatcatcgactccttccttgtggtggtgctcggaggcgtaggccagctggcaggcagcgtggccgcggcgtttgggctggggatctttaataaaatccttgaaccccagatgggggcggtgctgggcaagatcgtgattctggtggcgatcgtgctgtttattcagaaacgcccgcaggggttgtttgcgctgaaagggagggtgattgactgatgagccagccgctgaccttaacgctggcgcgcaaagcgccacgcaccacgcagatagcgggcagcctgctggtggtgtgtctgctgatattgccgtttttcgccttactgcctgcgacgcatccgctggggctgtcgacctggatgctgacgctgattggcaagatcctctgctatgccatcgtggcggtggcgctggatctggtgtggggctacgccggcatgctgtcccttgggcatggcctcttcttcgccctgggcggctatgcgatgggcatgtacctgatgcgccaggcggcaggtgacggtctgcccgcgtttatgtcgtttctctcctggagcgagctgccctggttctggtggggcacccagcactttgcctgggcgctggtgctgattgtgcttgtgccgggcctgctggcgctggtgtttggctggtttgccttccgctcgaagatcaaaggggtctatttctcgattatgacccaggcgctgacctatgccgggatgctgctgttctttcgcaacgaaaccgggtttggcggcaataacggctttaccggttttaccacgctgctcgggttttcggtaacggaaacgactacccgcatctcgctgttcctggcgaccgtgctgttgctgcttctggccctgggcaccgggtttgcgctggcgaagagcaagtttggccgcatcctgaccgccgtgcgcgacgccgaaaaccgcctgaccttttgcggctacgatccgcgcggcttcaagctgctggtatggacgctctctgccgtgctgtgcggtctggcgggggcgctgtacgtgccgcaggtgggcattatcaaccccggtgaaatgtcaccaacgaactcgatagaagcggccatctgggtggcgttgggcgggcgcggcacgctggtggggccggtgattggcgcggcgctggtgaacggggcgaaaagtttcttcaccgtcgcgatgccggagtactggcagctgtttctggggctgatttttatcgccgtcacgctgttcttgccgcgcggcgtctacggtctgttgcgtaagggagagaaataatgcagccaacggaaggattatttacccgtcagctgcccggcgatcgctaccgggaccagactgacccggtgcttcagcttgaatctattaacgtcaattttgatggattccaggccctgaccgatctctcgctgaatatcggcgtgggcgagctgcgctgcgtgattggccccaacggtgcgggtaaaaccacgctgatggacgtcatcaccggcaaaacgcggccaaagagcggcagggcgatttacgatcagtccatcgacctgaccgcgctggagcctgcggccatcgcccgccagggcatcgggcgtaaattccagaagcccacggtttttgaagcgctgacggtgtgggaaaacctggagatcgccatgaaaaccgataaatccgtctgggcgagcctgcgggcaaaactcaacggggagcagcgtgaccggatcgacgagatgctggttttgctgcgccttagcgcggagcgcgaccgacgggccgggctgctttcccacggacagaaacagttcctggagatcggcatgctgctggtgcaggacccgcatctgctgctgctggatgaacccgccgccggaatgaccgacgcggaaacggaatacaccgcagagctgttcaaaacgctggcgggcaagcactccctgatggtggtggagcacgatatgggctttgttgaaacgattgccgaccacgtgacggtgctgcatcaggggcgggtgttggcggaagggtcgcttcgcgaagtgcaggccaacgagcaggtgattgaggtctatctgggacgttaaggagagggaatgctacaggtcaacgaactgaatcagtattacggcggcagccatatcctgcgcggcgtgagctttgaggccatcaccggcgaagtcacctgtctgctggggcgcaacggcgtggggaaaaccacgctgctgaagtgtctgatggggctgatcccggcgaaaaccggggaggtcatctggcaggggaaaacgattacccacagcaaaccgcaccagcgggtgcagtctggcgtggcgtatgtcccgcagggacgcgagatttttccgcgcctgaccgtggaggagaatctcctgctggggctatcgcggttttccgcccgcgaggcgaagcaggtgccggaggagatctggcagctgttcccggtgctcaaagagatgaagcaccgtcgcgggggcgatctctcgggtgggcagcagcagcagctggcgattggtcgcgcgctggcgagtcgtccgcggctgcttatcctggatgaaccgaccgaaggcatacagccttccgtcattaaagagatcggccacgtgatccgcaccctggcaaacagaggcgacatggcgatcctgcttgttgagcagttttacgactttgccgccgagctggccgacagctatttgctgatgtcccgcggcaccattattcagcgcgggcggggtgaaaatatggagcaggagggcgttcgcgggctggttgcgatctgaaatgttataatataacatcttcattcttataaaacggaatgagggcgttactttggctgcacatattgggaaatttgccatgactctgggggcgctgctggtcagcggccagctatttgctcactcgcacggccaccagatgaccgaagcagaacagaaagcggcgaacggcgtgtttgaggataaagacgtgaaggacagagcgctgtctgactgggacggcacctggcagtcggtctatccgttcctgctcgatggttcgctggatccggtctttaagcagaaagcgcagaaggataaaagcaaatcctttgatgaggtgaaagcctactaccgcacgggttatgcgacggacgtggatgccatcggcatcgaaaataacgtgatggaattccatcaggggaaaacggtcagccgctgccagtatgattacagcggctacaaaattctgacctacgcgtcaggcaagaaaggcgtgcgctatctctttgagtgcaaggacgccagcagcaaggcgccgaagtttgtccagttcagcgaccataccatcggaccgaaggcctcttcgcacttccatattttcatgggcaatacctcccacgaggcgctgctgaaagagatggataactggccgacctattatccgaacgagatgtataaagagcaggtggtggaggagatgttgcaccactaggtttttgcttttgccgggtagcggcttcgccttgcccggcctacatttgctacgccgctttgggtgactcgcaccatgccttcacgctcatcccgcgcaaaatcatcagccacgccacaataatcgcggccatcataatcacaaacagcgaccagtgcggcaggttggtcaggatgataccggtgatcatcgggtttgccgccgcgccgagccagcccagcgcctgcgcggaaaaatagctcgccttcattcccggtggcgcaatgttgtcaatcagcatgtattcacccggggcatagataatctcacccagcgtaaagatggcggcagcgatgccccagtaaaccaggttttccccggagagcataaagccgcccagccccacgataaaaaacagggtggcgagggacatcagcgggcggatattgctggctgagatcttacggcccagcgcatattgcagcgttaccaccacggcggcgttgacgggcagcaccacggcgaccaccttttcggcgaaatcgctgtccgcatgtgcagcgagaacgtattgcgaaatacagctcgcgaacgacccgcccacgtacgacgccagcaggccagagagcgtgtaccagaacagcgcgcgatctttcagcaagaccgacggctgccacggcgtcttctcctcggcggtatctaacgccacgcttttctgcacaaagaagtggataaagcccagcggcagggcggcacagaaggctgccagccagaacggcagctgcaggctgtacatcaccagcaaggtgccaatcggcgggccgaccgtccagccaatgttcaggaagctgtagttcagcgaaaagacccgcgccttctggctggaggtgaggacgtcggagaaccaggctttcagcaccgtcgaaaagacggagtaggcgcagttgatcagcgcaaaaaacagcaccaccagcgtgacgttattgaccagcgggatcgccacaaatccggcgataaacgccacaatcgcgatcagcatgtagcgttttttatcaaacttatcggcaagaatgccaaatcccaggctgaacaccacgccgatagtaagcgcaatcgtcagggcataaccaatattctcgacgctcatgctgtagacgcgcgtgagatagatggtcataaacggcagcgttgcccctcgaccgatggttaataacaatgacgatgccagcagcgctgcggttgagcgcctgagagatggtttcatattcctgcccgacagttgcttatgcttttattcgatgtgtgttaacaggattaccatgacataaggggcttgtatagcacccgatttatccctaagtgcttcagctgcctgccagaaataatgatcttctcgtgacgcacttttttctgttaccttgaagtgttaacaaattattaataattcaggggcgggatatgacgcggaaagacgggctgctggcactgctggtggtcgtagtatgggggctcaattttgtggtcatcaagctggggctgcacaacatgccgccgctgatgctggccggcttacgttttatgctggtcgctttcccggccatcttctttgtggcgcgtccaaagatcccctttaaactgctgctgggctacggtctgaccatcagctttggccagttcgcgtttctcttttgcgccatcaagttcggtatgccggccggtctggcctcgctggtgttacaggcgcaggcgttctttaccattattctcggggcgtttgtgtttggcgagcgcctgcagggcaaacagctggcggggatcacgctggcggtgtttggcgtactggtgctgatcgaggccagcctgaatggtcagcacgtggcgctgctcgggtttatgctgacgctggcggcggggctgagctgggcctgcggaaatatcttcaacaagctgatcatgcagcacgaggcgcgcccggcggtgatgtcgctggtggtgtggagcgcactgatcccggttatcccgtttctgctggcgtcgagtattctggacggtccggcggtgatgctgaacagtctggtcgacatcgatatgaccacgatcctgtctctcgtctatctggcctttgtcgccaccattgtgggctacgggatctggggatcgctgctggggcgttatgagacctggcgcgtcgcgccgttatctctgctggtgccggtggtagggcttgccagtgcggcgatattgctggatgaaacgctaagcgcgctgcagctgttgggcgccgtgctgatcatggccgggctgtatattaacgtgtttggtctgcgggtgcgtcggacgacgcgggtaagcgaaaaggcataaaaaaagccccgcgtctgcggggcaaaaacgaatcagaagccgtgctgattataataaggcacgcctaattcgtcggatttgtcgctaccagcgcccatgtggttgaaatcatagggcgactggtcatgtgcggacggcaaaatcatcgtatcaggattattttgctgcgttgcacgaggggtttgctccgcgaaggtctggctggagaacagcaccagcaaggcgagggcggcggaggcgataactttcatgatttcctcggttacgtctgtgacaggcgatgattaactacagtgttttaacggatacaggtatcgggattcgcccggcacgctggtgattcggtacttatgaggcggcacgtcaaaatagttcttgaacgtacgcgtcagggtttgctgcgattcaaatccgtaacgctccgccagataaaggatcggctcattgctttctttcagtttctgggcaatctccgtcagcttgcggctgcgaatatattgacctaatgaatggccggtctcttttttgaacatccgttgcaggtgccatttggagtaacccgaacgctctgacactttttcaagggagagcggcgattccaggttatcctcgatccagtccaaaatgctatgaatggtgatagcgtcagtattgcgtctggacatcgtcatacctcttttttctgtttacggcaggattttcttcagcaaaagctcaagggttgccacttcatctgccgttaagttttttgttagttcctgatgcagtgtttgtcctactaattgatgacattgctcgcacatggccgcgccatcgctggtcagcttcaccagtacgccgcgtttgtcattcgggttagggcttcgttctatccatcctttgcagacgagacgatcgagcatgcgggttaacgcacccagatcgacagagagcacctttttcagctcaaccggcgtgatacacacttcgcagcgaatggaacacagcactttgaactgtgttgcggtgatatccagcggtgacagatagtcattgagcaggcgatcttttttctgattgaccatatgaataagacgacccagcggaacaacgtcgttaaagatatcactggtgcttttcacaatggttgccctggcaagtaattagtcacggcagatattattgctcaggcaagtataagtcaactgaatgaatcagccgatgccacgaattgctaaaacgtttcatgaactttttttaaggtgtttcaaatcatagagataacttccagttatcttttcagaaggaaaataatcgttacgttgcgcccatggctgaatgtcacactttccccctataattgctgtgttaaatatggataaggacgacaacgcactatgttggatttgattaaagcaatcagccttgggctggtggtcttgctgccgttggctaacccgttaacgacggtggcgcttttcctcgggctggcagggaatatgaacagcgccgagcgcaaccatcagtcgatgatggcctcggtgtatgtgtttgccatcatgatggtggcttactacgccgggcaactggtgatgaataccttcgggatttccatccctggcctgcgcatcgccggggggctgatcgtggcctttatcggtttccgcatgctgttcccggcgcaaaaagcgcatgagtcgccggaagcggccagcaaatcggaagaactggaaaccgaaccaagcgcgaatatcgccttcgtgccgattgccatgccgagcacggcggggccggggaccatcgcgatgatcatcagctccgcgtcgacggtgcgtgacagcgcaaccttcccggactgggtgctgacggtggcaccgccgctgatttttgcgattatcgggattatcgtgtgggcatcgctgcgcagttccggcgccatcatgcgctgggtaggcaaggggggtatcgaggcgatttcccgcctgatgggcttcttactggtctgtatgggcgtgcagtttattattaacggcgtgctggagattattaagacctatcattaagttcattgccgggtggcggcttcgcttacccggcctacgaaatccgtctttttgtaggccgggtaagcgcagcgccacccggcaccaacaaacctcacccgtgctgcccctgttcctccagcgccaccggccacttacggaagataagcacggaccagatcagcgccatcagcgccggaatggcacccagatagccaatcgccgacatcgacacgtgcaggatgacctggtttcccaccagcgcgcccgcgccaatgcccagattgaaaatccccgagaacagcgacatggcgacgtccgtcgcatccggcgccagggccagcaccttcacctgcatgcccaggccaataatcatgatcgccacgccccagaacaggctgaggatcgccagatggctttcactgcccgcggcgggcatcagcaacagcagacaggccagcagcaggccgatagcgctgctcaccagcgaggaggcatgccggttacccagcttgccgaacagcacgctgccaataatccccgcgccgccgaggatcagcagtaagacggtggcaaagttggcgctaaagcctgctaccacctgcacaaacggttcaatgtagctatacgccgtgtaatgggccgttaccacgatggcggtcagcaggtagatgctcagcagcgcagggcgacgcatcagcagcggcaggcttttcagcgagccggaatgttcgctcggcagcgcgggcagcagcttaatcagacacaccagcgtcaccagcgcgcccatgccgatggcgaagaaggtggtacgccagccgaagtattgccccacgatgcggccaatcggcaggcccagcaccatcgccagtgcggtaccggtagcaatcaggctcagcgcctgcgcgcgtttacccgccggtgccaggcgaatcgccagcgacgcggtgatcgaccagaacaccgcatgggcaaaggcgataccgacgcggctgatgaccagcaccgtaaaattccacgccataaacgacagcacgtggctcgcgatgaataagacaaacagaccgatcagcagcctgcgccgctctatctggctggtcagcagcatgaatggtagggacatcagcgccaccacccaggcgtaaatggtcaacataatgcccacctgcgccgtttccatctggaaactgttagcgatgtcagacaacagcccaaccggcacaaattctgtggtgttaaaaataaacgcggcaatggccagcgtgaccacgcgtagccacgcaaccctgcgggaaactgtgttcgttgtcatagggatgtcggagattcgttgctgaaaagaagaggagacgatcttaaaacgttgaatggcgaaaactcaaccattatgtgacgcagatctcaatatttaccttatgaaagcggtagccgggagcgctgttttcattgaatataaaagaacaacacaataaaaacaggcggtaagacaatgcaggagattgatttttatctggtcgatgcgttcagcaataccacgtttggcggcaacccggccgccgtttgtccgctcaaggaatggttacccgatgagaccttgctgaaaatggcacagcagcataatcagtcggaaacggcctttttcgtctgcactaaaggaggcattgagctacgctggtttaccacgcttaccgaagtcaatctctgcggccacgccacccttgccgccgcgtacgttctgtttaatgaactggattatcccgactcgcggatccactttgataccgcctctggccgcctgacggtcagccgggagggggagtggatgacgctggacttcccggcatgtccaacccaagaagagacgccgccgccggagatgctctcggcgctcggtatccgtcattacgttgcagcccgcaaagggcgcgcctggctgatcgtgctggataatcgccagcaggttgaagcactcgcgccacgcttttcggcgatgacgccgggcgagcataaggtgagcgtgacggcacggggtgagggggaatacgattttgtcagccgctttttctcccccggggtatccgttccggaagacccggtcaccggctccgcgcacaccatgctgatcccatactggggtgaacagttggggaaaacagccatgcttgcccgtcaggtttccgcgcgcggcggcgacgtgcgctgtgagctgaaaggctcgcgcgtgctgatgagcggacaggcttcactttatctgaaaggcacagtttttctgcgctaaatacccataacaagagaggaagagacaatgcaggaaattgatttttatctggtggatgccttcagcgacaaaacctttggcggcaacgcggcagcggtatgtcctctggaagcgtggctgccggacgagacgctgctcaaaatggcgcagcagcataaccagtctgagaccgctttttttgtacgcaccgacggtgggtttgaactgcgctggtttaccatgctcgatgaaattaacctgtgcggccatgctacgcttgccgcatcgcacgttattttcgaataccttgactatccgcacactgaaattaccttcaccacgcgcttcgtgggcgaactgacggtgaaacgcagcggcgactggctgacgctgaacttccccgcgtggtcaaccgaggtggtcgagaacccacctgcgctgctgtttagcgcgctgggcatcccagacgtaaaagaggtgcgcgtcggacgtgattacctggtggtgctggagagccagcagcaggtggaagcgttaacgccggatattggggcgatgatcccgctggataaaatggtctgcgtgacggcgccgggcgaaaaatatgacttcgtcagccgcttcttctgcccgggggaaggggtgccggaagatccggttaccggatccgcccacagcatgctgatcccttactggagcgaaaagctgggtaaaacgtcactttatgcccaccagggggcgcaccgtggcggggatctgcgctgcgaaatgaagggcgaccgcgtgctgattggcggtcaggccaccctgtacctgaaagggaaaatctttttgcgctaacggagcggtacgataagttaattgtatgaagcaccctggcaggcctgcgctatgttgacatttagcctcacaaaaaaagcaaggagcctgccatgtattccattacctctgaatctgcacgtctcccggacattctcagcctgatcgcggcgctggaccgctatcagagcgaactctatcccgccgaaagcaatcatctgatcgatctggctgcgctgccggaaacgtcgctgatcctgatggtcattcgcgaccagcagcttcaggccgttggctgtggcgccatcgtgctcaacggcgacggtacgggggagatgaagcgggtctatatcgatccggcccatcgtgggcagcaccttggggagacgctattggccgccctggaagatgaggccctgagccgtcattgccatacggtacggctggagacgggcatcaagcagcgcgccgcggtgcgtctttatgaacagtgcggatacgatttgcgtccggcgtttcccccgtacgttgacgacccgctcagcctgtttatggagaaggcgctggttgaagacgttcgtttagcagcgctataaaggcctccagctggcgggtcatcgccccgcgtcgccacaccagccaggtggtgagccagcgccagttttcggccagcggccaggcttcaacctgatgatgcccgggcatactctccagcatcgagcgcggcatcagcgcgatgcccgcgcccgcaatgacgcaggcgagcatgccgtgataggactccatctcgtgaatgcggccgggcgtggcgcggtcagcgtgaaaccagctctccaggtgccggcgataagagcagttggcgcgaaaggcataaacgtcgctgccgctcacctgcgcggcgcgtgagatttccgcctgcccggcaggcgtgaccagcatcatctcttcccggtagaccggcattccttccagctccgggtgcgacagtggcccgtcgacaaaggcggcgctcagggttccctccagtacgccatcaatcatcgtcccggacggcccggtagaaagggcaaactgaatgcgcggatagcgctggttaaactgtgccagcgtttcaggaatgcgcacggcggcggtactttccagcgcgccgagggcaaataacccctgcggctcatcccccgcgacgaccatgcgcgcttcatccaccagggcgaggatctgcttgctgtagcgcaggaagttatggccagccggggataaacgcaaacgctggttctcacgaataaacagctcaacgcccagatcggcttccagctggcgaatgcgggtcgtcaggttagacggcacgcgatgcaccttctgcgccgcctgggtgatactgcccgtcagcgcgacggcgttaaacatctcaagctgggttaaatccataatgttctcgtttcgtgaataaggtggttagtattattcatttttaagaaatagcagagtgggccacaatcaatcaaccgaaaaacgtggagaacaccatgacttattcctcagcaacacatgccttctctgtcaacccggccacgggtgaaaccctcgccgcgtatccgtgggcgacgccggaacaggttgaacgcgcgatttctcagtccgacgcgggctatcgccagtggcgtcgcgaaagcgtctcccaccgggcgcaaaagctgcgcgatcttggcgccgcgctgcgtcatcgcgctgaagagatggcgcagacgatctcccgtgaaatgggcaaacccattcagcaggcgcgggcggaagtggcgaaatccgctggcctgtgcgactggtacgccgagcacggcccggcgatgctgcacgcggaaccgacgctggtcgaaaaccagaatgcggtcattgaataccgtccgctggggccgatcctcgcggtcatgccgtggaacttcccgctctggcaggtgctgcgcggcgcggtgccgattctgctggcaggtaacagctatctgctcaaacacgcgcccaacgtcctcggctcggcggagcttatcgcgcagatctttgcggatgccggtttccctgaaggcgtgttcggctgggtaaacgccaccaatgacggcgtcagccaggcgattaacgatcgtcgtattgcggcggtgaccgtcaccggcagcgtgcgtgccggggctgccattggtgctcaggcgggggccgcgctgaagaaatgtgttcttgaactgggcggctcagacccgttcatcgttctcaacgatgccgacctggatcttgccgtgaaggcggcggtaacaggccgctaccagaataccggacaggtgtgcgcggcggccaaacgcttcattgtggaagagggtattgcgaagacctttacccagcgctttgtcgacgcggttgctgcgctgaagctgggcgcgccggaccaggaagaaaactatattggcccgatggcgcgttttgacctgcgcgatgaactccatcagcaggtgcaggcgacgctggcggaaggtgcaacgctgctgctgggcggtgagaaaatcagcggtgaggggaattattacgccccaaccgtgctggcgaacgtcaccccggcgatgacggccttccggcaggagctgtttggtccggtcgcggccattactatcgcgaaagacgcggagcatgccctgatgcttgccaacgacagcgattttggcctgtctgccacggtctttaccgccagtgatgcgctggcagagaccttctcccgcgagctggagtgcggcggggtgtttatcaacggctttagcgccagcgatgcgcgcgtggcctttggcggcgtgaagaaaagtggctttggccgcgaactttcccactttgggttgcacgagttctgcaacgtgcagacggtgtggaaggatcgcgtgtaatcccgcgatgtcggccctcatcgcgagggccgttgtcattaatctgcaatggttctgtcattttcatttcgtagactcgctcgcgtctaacgccttgtaaatgaagctaattatgaacataacgcaaatttttcgccgtattgcgcagcgtctcactccccgtcactttggcctgctgacagggatcttttgcattattggccttttctccgcgctgcagctctcctcgtcattcctgcttaatgcctccctgaacgaagcccagcgcaacgagcagcaaaacctgctggcgtggcagcagcagagcaagctggatctggcccgcgtctctctgctggcggcaagcgatctccttaaccgctccggcgtctggtttatgcaggataaagagaccggttccgacggaagctggcacagcctgatggatgacgcgcaaaaggcgctgacggtgtctcagcaggcgtggaaggcctggctggcgctgaatccaccgaaagacgacgccctggtaaacagctatcagctcttctacggcgcgatcaaagagcaggcggaaggtctggtcaaaaccaataccatcgacgctttttttgccgtcccggcgcaggcttttcagactgattttaacgacaactatgcgcgctaccagcaggcatgcgagaagcaggccatgcaggggcgtcagagcctcatggcgcagctctctgacctgcaaacgttattcctgtttgccccgttgctgttagtcgccattgccgctgtcgtctggttcggtatgtcccgatgggtgattacgccgctgcgtcggctcatcgcgcatatcaaccggctggcagcaggggatctctccggcacgccgccgaacgtcatgcgcttcaaccgggagatagggcagcttagtgacagcattgccacgatgcagcacggcctgcagcagctggtgacgcaggtcagccacgccacggctaccatggtggagaacattgactctctggcacagggtaaccagaagctctatcagcagtcggcacgccaggcgaaagagcttgaggatgtgacggcgcatattgcggcgctggaaagccacgtggaagggaataccggctatgccagactcgccagctcccgggccgatgaagcacgccaggcagccgtgggcggcgaccagatgatgtcgaccgtaaacgcgtctatgcaggcgatcgtcgaccgatcgtctgagatgcgcgggatcgtggcgatgatcgacagcgtggcgtttcagacgaacatcctggcgctgaatgccgccattgaggccgcccatgccggaaatcaggggcgcgggtttgccgtcgtcgcccgcgaggttggactgctggcccgaaagagcagccactcgacgcagaccatccaggagctgatcaaccgttcactgcagggtatcgaagacggttcccgtgccgtcaccctgatggaagagaatttgcagcaggtcaccggtctggtgggcaatttgagcagtttgctgaatgagatctccaccgccacgctcagtcagggagagcgtattcacctgatgacgcgtcagcttcaggcgctgaaccaggtctcccgtcagacggacctgctggtctctgacgcctcggaggcctctgagcggctgcaaaagcaatccgatcttttattgcaggccgtttcgcgttttcgtcttagcgcctgacgcaatacataagcctctgttatactcgcagcccgttttagcctgagggcaaggagcaaagtgtggctgcggtcatccataatgagatgttggacgagattctggcgcaggttcgtccgttaattggaaaggggaaggttgccgactatattccggcccttgcctcggtcagcgggaataagctgggtattgctatctgcaccatcgacggacagcgattccaggcaggggatgcaacagaacgtttttccattcagtccatttcgaaagtgctcagtctggttgcggcgatgcgccagtatgaagaagacgaaatctggcagcgcgtgggtaaagatccgtccggccagccttttaactcgctgcttcagcttgaaatcgagcagggtaaaccgcgaaatccctttatcaacgccggggcgctggtggtctgcgatatgctgcagagccgcctcagcgcgccgcgtcagcgaatgctggagatagtacgccagctctcgggggttgacgacattgcctacgatccggtggtggcccgctcggagttcgaacactctgcccgtaacgcggccatcgcgtggctgatgaaatccttcggcaacttccataacgacgtggcgaccgtcctgcaaaactacttccactactgcgccctgaaaatgagctgcgttgagctggctcagacgttcctgttccttgcgcatcaggggcacgcgccgcacctcgatcaggaggtggtttctcctctccaggcgcgccaggtaaacgcgctgatggcaaccagcgggatgtatcaaaacgccggcgagtttgcctggcgcgttggtctcccggccaagtcgggggtgggcggcggagtggtggcgattgtaccgcatgaaatggcgattgcggtctggagcccggagctggatgaaaccggaaattcgcttgccggtgtcgcggttctggagaaactgacccagcgtatgggacgttccgtttactgatgtctgacctggatccccttttttcccgtctggcgcgatcgacgtttcgctcgcgcttccgcttaggcgataaggaacggcagtattgctgggataaaggccccgataccattgatcagcatgccgctgattttgtcgaaaagcgccttgcccctgcacaacccgcgaatgacggcaaacagacgcccatgcgcggtcacccggtatttatcgcccagcatgccaccgccacctgttgtcggggctgtctggcgaaatggcataatattcctcacggtgttcagctcaccgcgcagcagcagcagtatatcgtcagcgtgattcaccactggctggtgctccagatgaacgcctaaatttgacgagttatgatcccgttatatttgtgttatagattcatcctaagtgagcgccgatcgtgctgacgaccgcaataactgccataagctttcatatggaatgaaatttaatgcgttctgctcttaccgctttcaggccgttccagcctgacacgccgctgcgaaatgcatcgacgatctttatcctcaccactttgttctattttgtgggtgcggaattacgtctcgtggaggccttgtcgctgttctggcccctcaacggcgtgatggcagggatctttgcccgctatgtttttctgaatcgcctgcattactacgcggtatcctatgtcgccatgctgatgtacgacgcggtgacgaccaactgggggatagcctccgtggtgatcaacctgtctaacatggtctttatcgtcgtggtcgccgtgctgattcagcgtgacaggcggctgatgaagaaaaccccggatccgcttaacgcattacgcctgttcaactactgcctgattgccgcattgctgtgcgcactgctcggcgcggtggggtcggtcgggattgacagccacaccttctggccgctttttgccgactggtttagcgagcagttctcaaccggcgtgcttgttgtgccgtgtatgctcacgataggcatgcccgtgcgcgaattcaggttacgtctggagcagctgttaccggttattgcgctgatcgtctcggtggtcgcgtcagtcgtgattggcggcgcggggagcctctcttttccactgcctgcgcttatctggtgtgcggtacgctacccattgcctgtgacctgcttgctgacgtttgtcacgggcgccattgaaattattctggtcgctaactcggtgattaatattgccgtggcgacaccgctcaccaccccaatgatgttttctgcccggctgggtattgccacgatggcgatctgtccggtgctggtctccgtcagcatggcagccattaattccctgatccgtcaggtttccctgcgggcggattatgactttttaacgcaggtttattcgcgttccggactttatgaggcgttaaaacacgaagagacgcaccgccattcgcgtttcctgaccgttatgctgctggatatcgattacttcaaaagcatcaacgataactacggccacgagtgtggcgaccgcgtgctggcgtcattcgcccggcaggttcagcaggtggtcggtgaagacgggatggtcgcgcgtatgggcggggaagagttcgcggtggtggtcaactctggcgacgctcgacacggttatgaactggcggaacgtatcagaactaccgtcgctaaccatccttttacatggcgtcagcaaacgctctctctgacggtcagtattggccttggaagcgggaaggcggaggcatggcagttgaccgaggtcttcaacaaactcatgaccgaagcggacgatcacctctatcgttcaaaaaaagcgggtcgaaatcgtaccagcgcccgggtcgcggacgagcatattaccgccgccaccgggcatgaaacagagctgcgttaatcgtcataaggcattgacgtgaatagcaagtggcttaacaggatgtcagaacactgacaatgtcactgtttaagctacgctttgagtaacgctttacgtcaggagacattatgaaagcacctgcaacccctgaaaatgaaacagacagactgaactcgctgcgcgaatcaggtctgcttgagatcgacagttccccggcgtttgaccggcttacgcgtctggcgaagcgcttcttccaggtgccgctggcaatggtcaacctcattgatgagcactcgctgatcgtgaagtcggccgatggcaaggcgcctgataccgttccgcgtaatatctcgttttgtggccatacgatcctcacagaagcaccgctggtggtaggggatatgctgcaggacgatcgttttgcggataatccgctggtggcgggtgaacctcgcgtgcgtttttatgcgggcttcccgctgcgcctgcgtgacggcgccagcgtgggctcgctgtgtctgattgattacgccccccgtgagttctcggcggccgatcttgccgtgctgggagacctgggcgcgctggcagaagatgagtttgccgccatcagcgcggcgaccacggatgagttaaccggcttattcaaccgccggggctttaatcagctggtgcggtttacgctttcggttgcccgacgccgggcggagccgctgacgctcggctggctggatttggatcgctttaaggagattaacgatcgctacgggcatgaagagggcgataaggcgcttaaagttatggcgcagctgatgcgcagcgctttccgcgaggcggatatgctggtgcgttttggcggggatgagttcgcggtgctgttcgcggataccgacgagcagggcgcctggatagccatgcagtatctcgccgagcaggtggaaagctataacgcccgcaagcttcacccgtggtcgctacacttctcatgggggctcagtgaattcgatcataacggcaacgacctgcaacagtggttaaaagatgccgatgaaaagatgtatgccatgaagcagcagcgccagcgcgcccggtgacataataaaagcctatgtccgaaccgcttgcgttaataagttgttaaacccaaagtgagcgtattcaacgtaaggaaaaacaatgaatacctcactgcaaatctaaaccctcacccgggaagagatcctcatccatcttgatgcgctggccgggatcctcgaaaactgcgtaaacggcggggcatccgtcagctttatgctcccttttagcctcgacaaggcccgtactttctggcgcggtattgccgaaagcgtcgcgcgaggcgagcggctggtgcttgcctgcgtcgatgcgcaggacggggtcattggaacggtgcagctgatcgcagaccagccggaaaaccagccgcaccgggcggatgtggcgaagctgctggtccatgaaaaagcgcgtcgaataggggccgcaatggcgttaatggaagcgctggaggctgaggcccgggccagagacatttctgtgctggtgctcgatacctccaccggcagcggggccgaaattttctacctgcgtgccggctggcaaaaggttggtgagatcccgcgctacgcgctaatgcctgacggcgccatgaccgccacctctgtcttttataagttcttataattattttgcacaaccgcaccgcggattgatcaaaacagggtttctggtcgttaagttttgataagttatcgtaccaatcttatcaggctgtatgactaatcataaaaggaacccccttgtgaacacgctcaaccgtcgtgattttcccggtgcgcactatccagaacgcatcattcagtttggtgaaggcaatttcctgcgtgcgtttgtcgactggcaaattgacctgttaaacgaacataccgatcttgacgctggcgtggtaatcgttcgcccgattcagagcgacttcccgccgtcgttaagcacccaggatgggttgtacactacgatcgttcgtggcctgaatgagcagggcgaggcggtgagcgaggcccggctgatccgctccgttaaccgggaaatcagcgtttatgacgactatggcgcatttctgaaactggctcacaatcccgatatgcggtttgtattctcgaacaccaccgaagcgggtatcagctaccacgcgggtgacagcgtcgacgatgcccctgcggtgagctatccggcgaagctgacgcgtctgctgtttgagcgctttagccacttcaacggtgcggctgacaagggctggatcatcattccctgcgagctgattgactacaacggtgacgcactgcgtgaactcgtcttgcgctatgcgcaggagtgggcgctgcctgccgcctttatccagtggctcaacgacgccaacagcttctgctcgacgctggttgaccgtatcgtgacaggctatccccgcgatgaagcggccgcactggaggctgaactgggttatcacgatgggttcctcgacacggccgaacatttttatctgtttgtgattcaggggccggcatctctttcgcacgaacttcgtctggataagtacccgttaaacgtgctgattgtcgacgacatcaggccttacaaagaacgcaaggtcgccattctgaacggcgcgcacacggcgctggtgccggtcgccttccaggccgggctggatacggtaggcgaggcgatgaatgatgcggagatctgcgcgttcgtcgaaaaagcgatttatcaggagatcattccggtcctcgatttgccgcgtaacgagctggaatcgttcgccagtgcggtgacaggacgttttcgtaatccctacatcagacaccagctgctctccatcgcgcttaacggtatgaccaaataccgcacccgcattctgccgcaactgctggcagggcagaaggcaaaggggcaattaccggctcgcctgacgtttgctctggccgcattgatcgcgttttatcgcgcggagcgtaacggggagagctatccggtgcaggatgatgcacgctggctggaacgttatcagcagctgtgggcgcagcaccgcgatcggcagcttagcacccgtgaactggtgcagtcggtgctcagcgcacgcgaccactgggagcaggacttgacgcaggtaagcggtctcgtcgaccaggtcacgctggatctgaatgccattctgcttaagggcatgcgcgccgcggttaaaccgctttgctaatgcattcacccagcttcggccgggtttgaataggccccatttagttacaacatactatgtgctttgtttttaaaaagcacatgcagcaccgtgcggatttcgctaatcaggggagaaaatgcaatgtcccgttaacaagcttgcaacggtgacggggatcacgtttaatatcctcgctcttttcttgcctgaaactcactatgatcgttcgtcctaaacagcactggctacaactgatttttgtctggcacggttcggtacttcccaagatctatacccgattgctgctcaacttcctgctctctatcgccgttatcctgatgttaccgtggtatacctcgctcggtatcaaatttaccgtggcgccattcagcattctcggcgtggcgatcgctatctttctgggtttcagaaacaacgcctgttattcccgctacgttgaggcgaggctgctctgggggcagttgatgatagcggcacgctcgctgtttcgcgaggtaaaaaacaccttacccgacgataagcacctcggcgaatttgtccgcctgcagattgctttcgccaactgtctgcgcatgaccctgcgccgggaactgaacgctgagcagctctctcgttatcttgctgcagaggatttacgtaaagtcatggacgccaactcaccggcgaaccgtattttgctgatcatgggggagtggctggccgtgcggcggcgaaacgggcaactctcagacattctgttccatagcctgaacaaccgtctgaacgacatgtctatcgtcctttccggctgcgagcgcattgcgaccacgccggtgccgtttgcctacacgctgattttgcaccgcacggtatatctgttctgcattatgctgccgttcgcgctggttgtggacctgcactacatgacgccctttgtctctgcgttgatttcctacacctttatttcgctggacaccctggcggaagagctggaagacccgtttggcacagaagataacgacctgccgctggacgccatctgcaacatgatggaacgcgatctgctgcagatgaatgatgaggagaacattccggacaggctgatgccggataagcactatcagctgacctgacgggcgttccactcgtcgcgggtaatctcccacagctcggagtccagcatcccgctgacgtaggctttcttctccgttctgataagccgcatgccgctactgtcagaaatacgacgggagcggctgttggcggcggccttcggggcccgcaaaacggatttgtttagcgtgttgaaccagtaatccgtcgccgcaatactggcttcgcgcatatatccgaaaccctgaaactccggcgcgagccagaacccgcggttgttatcctcgacgtcgtacaggcaaataatgcccatcaattcatccggcacctcacgtcgccggatgctccagaaccaggcaatcccttttgccatatccggcagcgccacgttgttgacatagttttccgcgccattatccgggtagggccaggggacggaagagaccatatagcggacgatctcccagcgcggatacagcgtttgtatctgggcggcatcttcggcaaccagcggtttcagcagtaaacgttctgtcgtgagcgtcggtatcgtcatgcgcggatctccctttttaggcgttatgcttttgtttgcgttctggtattttcatctatatgacattctgtttagttgcgttgtaacgtatttactaccaaaaatttgctctgctgagcgttcgactaccatcagattagttgggctaacttacctacccacataaggaataatgtatggttttgcctggaatgaatcctgagaccaatctccccggttatgattatgcgcgaatggcaggtttaggggctgcagatttcgatttcaaagcactgggttccgccatggactgtaatcgcgaatttgctcaggccggtatcatttattctgatggtactcaacgctacctggttcgctctggtcagcgtcatcctaatggccaaagtggtattgtaacccacgtaattgtaacgaaagcgaactcgcagccatccacatccagcgtaggtaaatcattgactgacgctgtgacatcgacatccatgggtactgagcttgcgtcgactgtactatcctgtggcgcgatgatcattactggaggtgtaatgcttgcaggcacggcagcaacacctcttaccgcaggaggcagtggtgttttagtggctatcggctacgctggtactctcgctaccggattacaatgtgttaacggtctttatcgaatttatgatctggttgaaaacggtggcggaaatgttgcatggctcgatacgcaagaatggtacgtcgccacctccacatcactggatgtaatttcgttagcaagtgcaggtggggcattaaaagaagccgttaccacctggcgtgcaatgaaatccatatcttccttgaaagccactgaatggttaaaaagctatcctcgtcaggatcgtgctcgtttgaccgaattgataattcgcgcgcaaaaccccggtataagcaacaaagaaatcaaggctcttatccgcgcgggtctttatccgaaacgctttccaaccgggccggttcaggtagaactcactcgacaacttgggcaagtggtaacaagtgccgcagcattagcaggaagtgcggtgagcggcgttattgcagcgcccagtaacttaccacggaccggtaaatacattatcggtaccattcagtcactggcggtattctgatgaagtttttgagtttgttaaccggacgggttttccaggatctcctgcaacatggtaaagatatagaggaggctattgctcgtcgtgatacccgccttctggataattccactcccgagctggaacggtatttttcgcgacccctcagcgagcttccgcgtcaaaatccttacccggtagctatgctgttacctctgtttttagtggcgtttgcgctaaaccttttgccttttctcagcacgttgcagggtttgtcacctttacatcatgcattgagctttttcttaccatcattgacgatgacaggcgcgctcattgtgacaagcgtactactggctcgtggaaggacgtcgggattgtcgggctttatggcgttgttcatcatcctgctgataacgaccctcgttcaggttctacatgtcatgctttctcatgatggaagcctctggccacacgtcattgcatctttcgcgctgttactttgtcgggtggtgatgaacggcagcggctttgttctgtttacgctctattgtcgtactcagcgtcttgccagattggcacgggaaatgcggctaaaaagccgttaaagggggaggttatgacattacgaaaagccacgccacaggaagccgaaacactctggaatatacgcaatcaggcgattcgtcacggctgtacaaccagttacgacgctgaggtcattgcgcgctggacgcccgatctgatgcccgaacgctatcggcacatggtcattgaataccctttttacgtggttgaagatgaaaagggcgatgttgcggcaaccggctacctcgatctggatacccattgcctggaggcgattttcaccttgcccgcagcctccggcaaaggcatggcgacccggattattgaggccctcaaacatgaggcccgcagccgggggataacccgcctgacgcttgatgcaacgcctaacgcccagtcgttttatcagaagctggggtttgtgacgctgcgcgaaaactatcatcactcgcgtatggcgggggctgatttacgctgttttgaaatggcgattactctgtaatgtgaggaaaacatggctgttacggtacgaccgctatacaaagacgattattcccaatggcgaccgctgtgggacggctatacccatttttatgattgctaccttgaggaatccgtcaccgcagcgacgtgggaaagggcgctctcagcgcattcatcgatgttctgccgggtcgtggagaaggacgaaaagatcatcggtttcgcaatgtgtgttctgcacgaaggcacctggtcaaccgcacccatctgctacctggaagatctgtttgttgatgctgccgaacgcggggcgggggccggtaaggcgctcattgacgctctgattgaggaaggcaagcgcgaagggtggtcgaaactgtactgggtcacccgggagaacaatccggcgcgtaaactttatgacaaatatggtgaagctgacgactacgtccgctaccgtctctccctctaagacttcaaggcctgtgtttgtatcacactgtatcagcgtcccggatacatacacaggcttgcaataaacccactttcgcacatatccgctatacattgaggtgttgtgatatccccgtgaattgtactcaaccggagataccaacatgttcagcaaacttgcttactcaaccctcgcactgaccgtttcgcttggcaccgtgatgtcctgtcaggcggaagccaccggcacgaatttcgcggccgcctttgatcatccccagcaaattaacgctggcgatctgaacgtcggttatgtcgacattggtccgaaggacggtcagccggttattttattgcacggctggccctacgatattcacagctacgccgaggtcgcacccgctctggcggcaaaagggtaccgggtcattgtgccgtctctgcgcggctacggtaccacgcgcttcctgtcagcaaacacaccgcgcaacggccagccctcggcgatggcgaaagatatcgttaatctgatggatgccctgaatatcaggcaggcggtatttgcaggctatgactggggcgcccggacggcggatatcgtcgccgcgctgtggccagagcgcgtaaaatcactggtgtcggtgagcgggtatctcattagcagccagcagattggcaaacagccgctgccgccaaaagcagagcagcagtggtggtatcaattctattttgcgacagagcgcggtgcggaaggctatgccaaaaacacgcgtgactttgcgcgcttaatctggtcgcaggcctcgcctgactggaaattcagcgacgcggtctttaacgccagcgccaaatccctcgataacccggaccacgtcgcggtgacgctcagtaactatcgctgacgtttagggctggaaaaaggcgagcgcaaatacgaccgctacgagcaaaaactggccacgctaccgaatatcaccgtaccaacgatcaccatcgaaggcggcaacaacggcgcgccgcatccggcaccgcaggcctatgcagctaaatttaccggcaaatatgagcaccgcaccttcggcgcaaccgtggggcacaatccgcctcaggaagatccgcaggatttcgttaaggcggttatcgacgcggacaagctgtgaaatgtgctattttcagtacgttacccttcggtctggagagttcggtggaacatattgaccacatccttgtcgtcgatgacgacagggatattcgtgaactgattgtcgactatctcgttaagtccggttatcgcgcctccggcgcggcgaacggcaaagagatgcgtgccgtgctggataaacagcatatcgacctggtggtgctggatatcatgatgcccggtgacgacggccttacgctgtgtcgagagctgcgcgtcgggaagtataaagatttgcccattctgatgctgaccgcgcgtaacgaggagacggacaggatcctgggtctggagatgggggcggatgattacgtcgtgaagccgtttgtcgcgcgtgaactgctggcgcgcattaaagcgattttacggcgttttcgcacgatgccgcccaatttacaggtaacggaagcagggcggctggtgatgttcggtgaatggcagctcgataccgtcgctcgccacttaatcgacccggaaggggtgatcgtcgcgctcagcggagcggagtatcgtctgctgcgcgttttccttgaccatccgcagcgcgtgctgacccgagaccaattgctcaacctgacgcaggggcgagacgccgagctgtttgaacgctcaatcgacctgctggttagccgggttcgccagcgtctcaatgaagatgcccgcacgcccgcctatatcaaaaccgtgcgcagcgaaggctacgtctttacgatgccggtgaccatcaaagaggttaacgaatgacgatctggccgcgctcgctgctggcccgtttgctgctcgtcgtgctggccggtctgctgctggctaacgccctgagcctgacgctggtcatggttgaacgcatgcacagcgcccgcacggtgatgctcggtaatctggaaaacgatgtcgcaactagcgtcgccattttagaccgcttaccggccagcgaacgcgccgcctggctgccgcggcttgaacgaggtaactatcgttatatcctgggcacaggggaacccggcgcagagccgacggataagcgttcgcaggacgccatcagaaccttaaaagcgacgctggccgcgcattacccgcttcgctttaccgccgttcctggcgccatttcacatattcaggcccaccttacgttacgtgatggcgcaccgctgaccattgacctgatcccacgcatgccgcccgtcgccagctggctaccggtcgtcctcatcctgcagctgctcgtactggcagtctgcgcctggatcgccgtgcggcaggtggtacggcctttttcacactttacccgcgcggtggatgcgctggatccggcggccagcacgcctatgacggaaaaagggccgcttgaggtgcagcgggcagcgcatgccttcaacgccatgcaggcgcgcatacagtcttatctccgggaacgcgcgcagatcctggcctcgatttctcacgatctccagacgcccattacccgcatgaagctgcgcgtcgaaatggccggagagcctgaacttcgcgacaagctcctgaacgaccttgataatatgtctcgtctggtacgggagggcattgcgtatgcccggtcatcggaatcactggaggagacgtcactgaagctggagctgaacgcctggatcaacagcatcgcctgcgattatcaggacatcggtaaaaatgtgcactttcaggcaagcgaaacccgcttgcccatcgtcacgcggccgcaggcgcttcgccgggtgatgaccaacctgctggataacgccctcaaattcggcgagcgtgctgcgattgcgatagacgtttcgtcggacagcgaggtcattattcacattattgacgacggaccgggaatacccgaagccgagctggaggcggttctgcagccgttttatcgggttgaaacctcgcgtaaccgcgataccggcgggacaggactcggcctggcgattgccgcgcagctgaccgcacagctggaaggaaaactcaggctggcgaaccgcgccgggggcggactggatgtcgccattacgctaccgcgtcgttcgtagaattgtacggctttgtatctcccggcctgggcgatacagagccagacaaaacccacgcgtttacacataccctgaacacatccgcacgatgaaatagcctcactgcagtgtcgcaggacatgtcatgtgaggtcactatgtttctggtaatcgcttttctgggcgggatgataagcctgctcagcccatgtacgctcccggttattccactcatgttcgccggtttccaggggcagcgtcggcatattctggccctgcttgcggggatgatcgtgatgttcactctggtggcaatggtcgtcaccgtcgccagcgagtggataacagaggcaaccattgtcgggcgctggatcgcgctcgtcattctggccaccgccgcgctggccttgattttcccgtctttcgcccagcgtattgcgggaccggccgtcagcgcgggaaatgttctcaacagccgtagcgggcaaacgcgcggaatggcatcggcttttctggccgggctagcggttgggctgctctggtctccctgcgccgggcctattctgggcgcgattttcagcattaatattgcggggcattcgaccatcgccacaggcgcactgcttgccgcctatggcagcggatgcgcgctgatgctgggtctactcgtgttcggcggacgctcgctgatggcaccactgagagcaaaatcggcgctaatggcgaagctgcgtcagggtgcgggggtggcgatgttagccgcagtcatcctgaacgcgacggggatgacttcgctactgaaaggggcaaacggcgtcgcggaccgtcttgagacggcgctcttgaatctggcgaaacctgccaccgcgccggtgaagctccagccggtagtcatgacagagcccagcagccagctgccttcgctaagcggtggaacagggtggataaacggtgaccctgtcacgtctgaatcgttacggggaaaggttgtactgattgatttctggacgtgggactgcatcaattgccagcatacgctcccccatgtgcgggagtgggccacaaagtaccagccgcagggtctggtggtgattggcgttcacaccccggaatatccctgggagaaaccgctgtcgtcggttaaaaatgcggtgaataaatggcaactgccgtatcgggtggtgacggataacaactatcaaatctggaatgcgttcggcaatcagtactggccagcacattactattttgatgccaaagggcagctgcgctataccgcctttggcgaaggtgactatgagcaacaggaaaaggttatccagcagctgctcaaagaagcccgctcataatcggatcagggctggcgttgagccacgataaacaaccttggaaaagccagcagtatctgcccgttttcctggagcggatactgctcttccagcagttcatggtagcgtttcaggaaccgtttctgctcgctctcgttcagttcctgaagccaggggcgcaggccggtggcgcttacccagtcaataatcgcctgatgagagctcattttgtgataataggttgtccgccagatatccacgtcacagccagcttccgacagaatatcgtaataagcatgcacgcccggcagcggttcgcggccacggtctggatagtcttgctccagcgccacttcacgcatcgccacatgggtgggttccagccagttatcaggcatctggaccgccagcacgccatttagcttaagcagggaaacaagatgcggcaggagatcgtaatggtccggaatccattgcagcgacgcgttggcataaatcaggctcagcggctggccgggcgtgtactgacgaatatcggcctctacaaaatggcaatcgggtaaggcggcgcgtgcttcctcgagcatggcaggggagttatcgaccccggtgatgtgagcagaaggccaacgatgcttcaacagcgcggtgctgtttcccggtccgcagcccaaatccgcaatggtagcggcctcattcagaggaactctggcgagcagttctgcggccggacgcgttctttctgcgccaaattgcaggtaaagagaagggttccagtcggccattatcaattctccgttttgcatgtttctgcaagaatagcacaggcagatgcctgcaaagcggtagtggcgagggtgtttggccagaagaagccagcagagtcagaaaatgaggaaaggtgcaaaaaataataaaacggaaatgttaccccttaaaagattaaggggcaatacatttattgtaattattttatgattattgttttttaatattttatcggcaaagtgcttcttatgctctgtacccgaaactttaaatattagataatcatcgatgggtatatccctggtgtttcgtaggtctttgacctcctggccgcttagttttgcgagaacttcgtggtcaggtactttttaagtatagggaatatgcggcacaatgaaagctgtcctaaaagacaggtgataatagtttcaggtgttattatcaggaacaagagcatgaattctgtcattgaattttttttacacgactacgatgatttacccccagcattagcgcgcgaactttaccgactccggagaaaaacgtttcgggaccgactcgactggaaagtggaatgcgtcgaaggtatggagaaggatcaatttgattcccataacacgacatatttactgggtatgtatgatggacaactgttatgcggcgcacgatttattaacgcaacgcagcccacgatgataagcgaaatttttcataattatttcgacaaccccattatttttcccgcagatgttccttgttgtgaagtgagccgtttatttttagataaagaaatacgagattccgcaagtctgcatggcgtgcccgccagtaaagcattgtttcttgcaatgaatatttattgcatgaagaacaaatatcatggaatgtatgctgtagccagtcgtggaatgtatgccatatttcgccatgcgaactggaaagttgaagttattcagcgcggtgtttctgaaaaaggcgaggttatttactatatttatatgcccgccagcaccagcattattgaagacattattagcaaagacaaatccagtcactggcttcgcgaaatgctcgagcacttacgccatttataaccagtggctgaggctcagtcctccagtaaccggagttccgttccaagttttattgcgtgtcttgcattattcacaccgagctttttcatgatgttgcccatatggaatttaacggtgcgctcagcaatagacaatataacagaaatttctgcgtacgtttttccggcgctgacccatttaaggatttggcgctcacgtggcgacaggaaaacattttttttctgctgatgctgactatacagattgagtgtcttctggtgtaactgaacaaggaagcgtagaaaatgtggccgatatttttcaatgtcaatcccagaatgcttaggactgatgacggataagacaacaagattattcaaatagtcatgcagaggaaacgtctgtccctgataaatatcatactggacactttcgtcgaaaatacgcgtcaggttataaccatctgacaggacaacatcactttcccagaaaaaatcttccacacagcgtaaagcccgaatgataacagggtcaatgaactgatattttttttcaaggtagatagtaaaccactctggactgttattgattatcctcatctgtgagggatctttcttgttcataatggcgtaggcgaagacgatccctttgaagtcctcaaaaaacgcgtccagctcactctgaatttgcgtattgatcgttaagtcgttgtaatatgtatccttcacgtgagttgctgcctcctgtacgagtggaggagcaagtataatatgcttcgttatctgtagcgagtcgcattttaatccagtcaacagataagacaggctgcctcaactggcagcctcgtgaacgtttgggatttttgaatggtaaatgcagatgacttagggaattgttgatgtttttatcgaatttcgaaatcgttcactaaatatagtaggctgcaaaatttaggaggttttacgcttttcccccaggttcatacaaattgaaatcaggatttaaaccagtgggttagagaatgcctttcagggcaatatgataaagcaacatgatggttttaccgtcgacaatcctgccggtttcaatgcggcgtaatgcctcttcaagcgtcatttccagcacgtcgatatcttctccctcagccttgatcccgccgccggcgccggttctgtctttcggctgatactcggcaagataaaaatagagtttttccgtgacagagcccgggctcatataggcttcaaagattttctctacgcgcgaaacgtggaatccggtctcttcttccgcttctgctttgatgcggctttcaggatccatgttgtccagcaatcccgccgccgcttcaattaaatcgtcctcatggccgttgataaaaacagggaagcggaactggcgcgtcaggatgaccgtctttttctcacggttgtagagaagaatcgtcgcgccgttgccacggtcatagacttcccgctgttgccgctgccattcgccatcacgacgctgcaggtcgaaggtgtattttttaaggatgtaccagttatctgacagggtttcactgttaattatgcgcacatctgcacgttttgattgcacgattgttcctccttacgtagagtaatactcacaaacagcaatatcatgcactttcaaggtaaaacatgcaacatcaggaaaacaggatgctcactcgtcagcgaaaacaattgatccttgaagagctgggtgccgaaggtcaggtccagtcaaaagcgctgagcattcttttcgacgtttctgaagacactatccggcgcgatctccgcgagctggcggcagaagggcgtttgcaacgtgttcacggcggcgcactaccgtcatcttccgcaattgctccgtttgccgaacggcaatccgtgaagatggatgcaaaaaaaagggtggcccggaaaggggcacagctgatttcatcaggccaggtggtgattatcgacggaggcacgacaacctcggagctgattacctttttcccgcctgacttgcgcatcaccgtggtgacgcacagcccgagtattgctctggggcttgttgatcatcctgccattgaggtgattttgatcggcggacggttgtataaacactcgattgttgcggtcggcgcggcggccatcgaaggcatagagaatattcatgcagatctgttctttatgggcgtgaccggtattcatccggatgcggggctgacaaccggcgatttcgaagaggcatgcatcaaacgtgcattctccggcagagccgcggaaacggtcgttctagcgtctccggaaaagatcaacaccgcgtcgtcgtttgtgattggcgatgtatcatcagtgaataccatcatcgttgaagacggtacagataaggagtggatccgcgcggtatcggaaaagggggtatccgtcgtgctggcctcagatcgtgacagcctctgacagccagcgactggctgtcaggatttagcttctaaatgactttccggcgcatggcatacggcttcgatgttatgaccatcaggcgagatgacgaaagcggcatagtaattttcaccataggaacgtagccccggctcaccgttatcacgtccgccagcgcccagcgcggcatggtaaaaatcatctggtcttggccacaaacgccagatgcagaggcgctggtttgtcatttgtctggaaaaggcaaagcgaaacgtcgccagagctcatctcaacaccataatccggcgcgccttcatcgacgagttcaacaccaagcggacgaagcgcctcgaggaagaaggttttacttttttcataatcgctgacgccaaatttcacatgatcaaacattatcgactccttgaaagcgatagagaaataaagagtatagaaggtgacaggagtcgaatatgagcacaggtacgtctatgtgacagatatctcgttacatagcagactgtttccgtccaacaaacgtccagcgcaggtaatcgtaaacccagttaaacagcatcgtgtacggcaggaaaaacagtaccaaacccatctcaacaaaaaatgcctccgtcatcgttaaatgcagcatcaccatggccacaggaattaacgtgatgataagtccggcttcgaaacaggccgcatggagcgcgcggacgaggaacgttctttcaaactggtattttttctgaagagcgtcaaagaatttgttaaacacaaaattccaggccgtggcggtaagcgcggatatcacggacagcgaaccagactggagtaccgacacgttcatcagccacgcaagcgacagcgcgatgataatgttggccgtgacttcaaaaatgaccgcgtggaaaatcctttctctaaagcttttatctaattcaatttccataagtttacggcagcagtgggcaaaggctgaagtatatcaaacgtctttcaaccatgtgtaaacgtagacgttgggtcgtgcggggcctcgacacaaatcatgcctgaaaaggtggcttcacatgattcaatggaccaggtcaatcatgaccgcagaaatgcagattttgcctctccttatttaagtgcgcataatgtatattatgttaaatgacatctgatagttaatcacgagccgatacatcaatctgttattaattctgaccaccctctcgcttctcgtctttcactgtcgataacgacgatttgtgaaaaaaactcaaaacaccattcgatggcgcatgctggttcccttcatgtcagtgcaataacctgccgcatacagaattgctggcaataaaagaaggaacacagaatgaagtatgtgaatctgggtcgtagcggtttgcaagtctcccgcctttgtctcggttgtatgagctatggtgaacctgaacgtttgcctcaaccctggtccctggatgaaaaggcgtcacgtccgctcattcgacaggcgcttgaagcgggcattaatttttttgataccgcgaatatctactcgggcggaagttctgaagagatcactggaaaagcgctgagagaaatggccagacgcgatgagatcgttgtggattgtagagactttgctcagcaaccaggcccagagaatgacgagccgtggcaactgactgcgcagtcgcaatgtcccagcccgcgaaattgctgctaccgatataaagcgcttttccctgctgaacaaggagttccatggcctgccagacctcttcccatggcgtatagcgatcgatgtgatgcatcagatagacgtcaatatggtccgtcttaagccgtcgcaaactgtcctcgcaggccttgcgaatatgataagcagaaagacggcgatcgttcggacctagccccataggctgatagactttcgtcgccaaaacaatacggtcacggcggccaccctgctggagccagcgaccaataatttcctcggacagccccgaaccttgctggatatcgggtgattgctcagtgccatacacgtctgctgtatcaatgaaatttatacccgcctcaagcgcttcatccagaatgcgggcgctggttttctcgtcggtgacgtcaccaaaattcatggttccgagacaaaggcggctgactttcaggccggtgcggccaagatgcgtatagttcatacacggctccgttaggtgaatgttccgccctgaccgacggccagagcgcataattttcaagaataacgaagcacaacgtgttcagtgagaggcgatgagcggatggacttgtgaaataaattcagcaacggattagcgctaatcggtctatggtgtatatcatttccgtatcaacacattcgggccttaacgcacaaggaaaacgattctgtatgcaaataagcagagctgatgtcgccgatctcatttatttcatggctattgcacgtcatcgcagtttcagccgtgcggcgattgaattaggtgtcagtgcatcagcgcttagtcatgccctgaagggactggaaacccggctcggggttcgcctgcttaatcgcacgacaaagagcgtcacccctacggcagcaggtgaagaactggttcagtctgtccttcagcctttcgacataatagaaggcgcacttgaatcgcttaacaagtatcgtaatacccctggcggacgtatccgcatcaatgctgccgttgaagcggccaatcttttgcttgcgccggttatgcccgcgtttatggatcgctatcccgatattgaaatcgatattgtggccagcaaccgtatggttgacgtcactgatgcgggcttcgatgccggtatccgctatggtggcaccgtcccggaagacatggttgcccggcgtttatctgccgatattcgctgggttatcgcagcatccccagactacctggaacgttacggaacgcctgaacatccggatgatttattacaccatcgttgtataagcaatcgtctcggcgacgatcggatttatcgctgggaacttgagcgagacggcgaaacgtaccaaatcactgtgccaggctcagtgacggtcaaccaggctgaaacgggccttgtggccgtcttaggcggagccggcctgatgtattttccggagcctcttgttgccccctatgtgaaagatggacggctccgcctggtgctgacggaatggtccccgctggaggaaggtttttatatctattattcatgccgccggcaactgccgaccgggcttcgccttctgattgagttcatacaggaggccaggccgctggggttgtgaaatagcgcttccatgcgggacgatgcaatgtcgtctttatcgccccgtagcggatatcataaaatcaatcagggccttcactcttttaaaagcagtataatcaaatgattaaaattttatcccttcgcctgaaacactgtaacgcgctggccaacagcatgagcaatgcctccccgacacagctgcagcagtttaagacgcaattgtccgaacagatgggtaagcctgtgggactacataccatgggtattccggcagcgatcagtacgctcggggtgattgtcagtttcgccattccgcagctgtggttgggctatggcgtactcgccgcactcagccagccagctgaacgcgtattcgtgtgggttgtgctggtcgccctgcttttcgctggcatcaacggcgtgacgatgttcatgattggcaaaggcagcatgcgcgccgtacggatacaccttgcgttggcggtgataagcctggtattaacggcagcctatctgctggccgcgctgatcggtagcccttttccgggcgtcagtctgactgcggcactggtgagtatcgtcatgttattgcttagcggcagctgtatcctctccacatccttttataagatgctgctgtttactctgcataatcgtgcctggcgcaagctgatcgggcaaactcgcgatgcacacacaccgcactaaggatgcaccgcgtaaaaaacctcgctcattatccaagacgcgacaccttcactctcgcctcgtccagatgggtgcgcaatgcggcaagacatggcgcaaaattggcagaaaagcggccgcaactgctggccagcgtataaaagcgctcggccagcgccagtgcttcatgccaggtttctcccgcgatcgcgtcaataagcgtagccggacgcagcgtattcaccagtgcgcctcctgatttcggggcaaatcccatgggcagcatgtcataggcaggagcaagatcgtaaggccgtccgtgggaactgataaacgacagattaccgtggtgcatgtcggtattgccgatcagcataccaaacgcccaaagccttgacgtgctggcgaccgcatcctggtgaacacagccctgctttgccagctcattcaccagtaccggccaggattctcttgccctgccgacaaactccgcctcgagcgcacgtaaagaaaagagtcccttacgaccaaggggtcccgtacggtcgaaccgcgggatctcaaggaagcgctgtccgccaaaatcaaacacctcggtttcgacgccaagcacgcttaacgcaagatgttctgctagcaaaaggtctcgccagcgttcgcttacagggttatcgtccggtgccgtgaatttcacaatcacgtggccacgttctgtataagtacagaacttcggctgttcacccccagcagaggagcccggtacttcgcccgcgctcacggcctgcgccagcgacgggtatgcggttgcgcggtccaccgcaacaggcgacggcatctctacaaaatgattcctcgcctgttctccgattaacaggttccccaccgcatcgtgcccatgagcgagcaaagccctgataacgtcagtatcactccagttctctggattcggcggcaggcccagctcggatgaaaatcgcgaggcgtacgcgcggccaagatatccctgaggccgcatgtcaaacaaccaccacggcaacccatcgctatggaggcacacattgtccgtttgcgccattacaaaaccatctggataaaccggaatgagtttacccagcgatttaacctgaccctcttccgtgatgcggtagacaggagccgaactgaatcctcgatgtgtatcccgcagcacatagtgaatagatggaccggagccaatgcgaacaacctcatcgccaagcgctttaatcgatcgtgaaacggtaggctgactaatacccataatatcagttagttgccttaccgataccgggccttgtctcagcaattgtcgtagtgtttcggatcgattaatcatggttttgaatagctttatgaataggttattgaatagctaatttatcaggtattgactcccctgtcatcttcaccaacggctgtctctggtttatgcctgcgcaaccaaattaacttatacgccgcaggaataataaacagcgacagcagcggtgccgtaatcatcccgccaatcatgggcgccgctatccggctcatgacttctgagcctgccccggtcccccagagaatgggcagcagacccgcgatgatcaccgcgacggtcattgcctttggccgcacgcgcagcacggcgccctgataaagggcgtcatcaagcccctgttcagtgaacgtttcgcgctgggacagcgccggatgtgcttcaacggcatgacgcaaatacatcagcatgaccactccaaactctgctgccaccccggccagggcgataaacccggtgccggttgccacggacatatggaagccctgccagtacaggaaccatatcccgccgaccagcgcgaacggcaggctcatcaggatcagcaacgcttcgtccacgcgacggaacgccagatagagcagaatgaaaatgatcatcaccgtcatcggcaccatcagcttcagtttcttgttggcgtgctcaagcagttcaaactgcccggagaatgacacgctggtacccggcctgagcttcacgttctggctgatggccgtcttaatgtcgttcaccaccgacaccatatccctgccgcgggcatcgatataaatccagctcgcaggccgggcattctccgttttcagcatcgtggggcctgaaacaacgttgatatctgccacatcacccagcgtaatctgctgtttcataggcgtcaggatcggcatctgcttcaacgcgctcgggctattccggtagtcctgagggtaacgaatattaatcggatagcgggccacgccttccaccgtttcacccaccgtcgcaccgccgatggccgaggagacgaacagctgcacgtcgcccaccgtcattccatagcgggaggctttctcccggttgatatcaacatcgatgtagcgcccgccttccagacgttctgccagggcagacaccacgcccggcaccgttttggctaccgcttcgatgctctgcgccgtggcgtcgatatcagccagaacggtaccagacaccttgatgccaatcgggcttttaatcccggtcgacagcatatcaatgcggttgcgaatgggcggaacccagagattcgccagaccgggcaaacgaacggtcttatcaagctcctcaacgatcttgtcaatcgtcatcccgggacgccaccgatcctcaggcttaagctgaatggtggtttccaccatttcgagcggcgcggaatccgttgccgtttcggctttgccggtcttgccgaagacagaggccacttcagggacggtttttattaacttgtccgtggtctgtaacaatgccgccgcttctgccggagagacgccgggcaacgtcgacggcatatacagcagatcgccttcgttgatcttcggtaaaaactcgccgcctacctggctcaggggccagatcaccgtgaagatggataaggccgcaaccagcagggttgttttgggccagttgagcacccgaatcagcagcggatgataggcgttaatcagcagcctgttcagcgggttacgggtctcggcggggattttaccccggatccagaatcctatcagaatggggatcacgatgatggccagcgcggccgcccctgccatggcatacgttttggtgaaggccagcggaccaaacagccgcccttcctgcccctcaagggtaaagatgggaatgaaggataaagtgatgatcagcaagctgataaacagcgccggtccaacctctacagaggcgttggtaatcaccttccagcgggtggcgttatcaatctgctctcccgggtgctggtgatcccactcttccagccgcttatgcgcgttctcaatcatcacgatggcggcatccaccatcgcgccgacggcgatggcaatgcctcccagcgacataatattggcgttcagcccctggaaatgcatgacgataaaggcaatacacaggccaagcggcagagagataatcgccaccagcgccgagcgaatgtgccagaggaatagcgcgcagacgatggccaccacgataaactcttcgagaagtttgctgctcaggttatcaatggcccggtcgatgagctggctgcgatcgtaggtggtcacaatctcaacgccttccggcaggctggccttcagcgtctccagcttgtcttttaccgccgtaatgacctcgcgcgcgtttttacccgaacgcaggatcaccacgccgcccgccacttcaccctgcccgttcagctcggcaataccacggcgcatttccggccccgtttgtacgcgggcaacatctcgcaggtaaatcggcacaccgttctcaccggttttcaggacgatgtgattgaaatcatcgatggtctgcagatagccgctggcccgcaccatatattccgcttccgcgatttctacggacgatccccccgcttcctgattagacgattcaagggcctgcttaacttccggcaggctgacgccgaactgcgccagctttaacgggtcaacctgaatctgatactgcttcaccacgccgccgacggaggccacctcggccacgttcgggattgttttcagctcaaatttcaggaaccagtcctgcaatgatcgcagctcggcgagatcgtgttttccgctgcggtccaccagcgcatactcaaatatccagcctacgcccgtggcgtccgggccaatttcggaactcaccccggcggggagtttgccctgaacctgattcaggtactccagcacgcgcgagcgggcccagtacagatcggtcccgtcttcaaaaataacgtacacatacgaatcaccaaactgtgaaaaaccgcgcacggtcttcgcgccaggaaccgacagcatggtggtggtgagtggataggtcacctggttttcaacaatctgcggggcctggccgggatagcttgttttgataatcacctgaacgtcagacagatcgggcaaggcatcgaccggggtgttgatgatggtccatgtcccccagacgctgagaaacagcgcacccatcatcaccaggaaacggttggcaaccgaacgccggataatccattcaatcatcatcgtctccttaatggcctgaatgcgcgtcgtcagcggcttcagcgtggcgcatgcgctccagcgcgccggtaatattggcctccgagtcaatcagaaacagaccgctgaccaccaccgactccccctcttccagtccggtaccaatgccggactgctgctgagattcatgcagaacgtggatccttttcggtacaaacttcccgttcgcatcaacggtaataacgcgctgttctttcccggtatcgataacggcctgagacggaatgagcaacatttcctgactttgggtattcagcttcaggtaggcattcatgcccggtttcagcagttcatctttgttggagacctgcaggcgcacctgcagcgtacgggtggtttgatccacgctcggcagaagacgccatttttcaaccgggaaggatttatccggataagccggtaccgaaacagtaaactgcgaggtatctttcagcagataagcaatggattcaggaaccgccgcgccgatccagaccggatccatcccctgaatctgcgccaccaccttctctttggaaatattcatcccggtgcgcaggtcaaaggccgtgatcaccccgtcaatgggcgccttgatggtaaaccgggtctggatagtgcgggtcgcacgcagccgctgaatgtcgtcatccggcatacccgccaggcgcagacgctccagaacgccttttatctgcgtgggcgttccgccggtaccggagagcaggaggaactcgctctgcgcttcgacccagtccggaatggtgatatcaaccagcggcgtgccttttttcaccttatcgccaatcgtcagcgggtacactttctcaacgaacccttccgcacgcgcctgcacaatgacaaactgatagtcgttatagctgacgttggccgggatcgtctgggcataattcagctttccgcgcgtcactttttgcgtttttaatcccaggttctgaacctgggtcggatcgatacggataccgtcactgcttttaccatcctcatcggcatatttcggcaccagatccatatccataaacggtgatttaccgggcttgtcgaatttcacgtcaggcttcatcgggtcataccagaaaaggacctttctttccgcaacgctatttgctgttttttcagatgaataaagtgtctgccatgccgtcacggatatcagccctccggcaataaggctgctgactatcatggcagcatattttatttttaatgaggccatgccgtttctcgctattttatgctcttgagtaaagagagattgccctgctgaacaaacgagaaattcacgtggctgccgacttttaaggcagtaatactcgcgtcggcctgcataaaagtaaaacgcatggtcatcgcgggccagccaatttccgggatggcttcgtgagaaatcgtcacttttttattcgtgagatcaatatccttcacaatgccggtcccggtgatgacctgctctgaggcaccttcgctggcggcgctcatctccgcgtgctgatgaacctcagcctgaagaccggcagaaaacataatgattgcaccaaatacgacggcgttaagtgaattgcgcatgtttaatatcctttttaattaaatgaggttattcggcccaaccgccgcccagcgcggtgaagagattaatttcattaacctgccgggcataaataaggtcgagaatattttgctgcgtggaaaacagcgaccgttccgcgtctaatacttcgatatagctcaccgcaccgctggtatataatcctctggcccgctgcagggtaatatttagcgaatcaagataccgttcttgcgcagcaagctgctggttgaggctgtcccgcagcgcgagcgcgtcggcaacctgcctgaaggcagcctgtattttttgttcgtaattcacaaccgactgctgctgacgaatttcagccagcttcaggttggccttattcctgcccgcattaaaaatcggaagttcaattttaggaatgaaattccacatcccactgcccgcggtaaacaggctggataattccgtactgcctgttgaaagcccgctggtcagggaaattgacgggaaaaaggcggcacgcgcggcgccgatattcgcatcggccgcgttaagctgatgctccgcctccataatatccgggcgctgcagcagtatcgctgaagaaagatggggcgggagttttaccggcgcaatatcgcgggcgttcattccgctgtcgcccggcaatccgcgataggtgccgaggagcagctgcagagcattgttggcctgcgccagctccccctctcgtttggcaatctctgcctgcgtgctttcgatctgtccccgggcctgttccagcgccagcacgttcgtgctgcccgtcaccagctgctgctcaacgaacgcataagactgccggtaatttttcagcgtttcccgcgcgatgcgcagctgtttatacgccagttgctggttgaaatagctctgcgacacgttagagacaagcagaatatgcaccgcgcgacgggcctcttcgctggcgaaatagttttgtcggtcggcctcgctcaggttcttcagcttgccgaaaaagtcgagttcgtagctaagcgcaagaccggcgtcgtactgccgtgaggtcggtttgtcactttttagcccaccgctgtacgtgatacccgcggatccattcaactgcggataacgatccgcctccgtcacgttgaactgcgcccgggcctcttcaatcttcagggcggccattttgatatcgcggttgtttttcagggcttctgtaatcaatccagctatctgtgggtcgacgaagaagttgcgccagccggtgtcctgatacccggccgccgcgggcgtcaggccgttgcgcgagagcgaaaactgccggggtatcggtgatgccgggcgcgggtattcaggcgccagcgagacgcagcctgccaggataaataccgtactgatgctgagtcgttttaacaggaacatagcggttcaaatcaagtccagaggatttttagggctactctactgaacgcatcctgtttgaccggtgacaggataatgacaatgttgtcatttatggcgtaagtcattgttaacgatcgcgggctcactagaatgtcatcagcagccagtctggggagcaagatgaaaatactgatcgttgaagacgaaatgaaaaccggggaatacctcagcaaggggctgacggaagcggggtttgtcgtggaccacgcggataatggcctgaccgggtaccacctcgccatgaccgcggaatatgacctgctgattctggatatcatgctgcccgacgtgaacggctgggatattgtccgcatgcttcgctctgccggcaaaggaatgcccatcctgttactcacggccctcgggacgatagagcaccgggttaaagggcttgagctgggcgcggatgattatctgattaagcctttcgcctttgcggaactgctcgcccgggtcaggacgctgctaagacgcggaaatacggtgatcgcggaaagccagcttcaggcggctgacctgacggttgaccttgtatcgaggaaggttagccgggcgggcaatcgcatcctgttaaccagcaaagagttcagcctgctggagtttttcctgcgtcatcagggagaggtacttccccgctccctgattgcctcccaggtgtgggacatgaactttgacagcgacacgaacgcaatagatgtggcggtaaagcgcctgcgcgcaaagatcgataacgattttgaacccaagctgatccagacggtacgcggcgtaggctatatgctggaggtgccggatgcccgttaagcccctccgacgcccgttctcgcttgcgctgcggctgaacttttttatcagcctctccaccatactggccttcttcgcctttacctggtttatgctgcattccgttgagaagcactttgccgagcaggatatcagcgacttacagcagattagcagcgcaatgcatcgcatcctccagtctccggccgatcccgaccaaaagaaaatcagcaagctcaaagagtcggtcgccagctaccgcaacgtggccgtcctgcttctggatccgcagggcaataccctgttcagctcggcgcaaggcgcggcattgcgcccggcgatgaacacagcgaactttagcgaacaccgtcaggcacaggatgtgtttctctggacggtagaagacccggtcaagcctatgcatgccgggtccgacatgaaaatggaaacgtaccggattatcgcctcttcaggcaggacaacgctgcagggcaaaacccaggactacgtcatgctgatcgggctctcgattaattttcatctccactaccttgaggcgctgaagaagaatctttttgccattgccgcggcaatcagcctgctgattgtgctggtgattcgtatcgcggtgcgtcagggacacttgcccctgcgtaacgtcagcaccgccattaaaaatatcacctccgaaaatctggatgcgcgcctggagccgtcccgcgtgcccgttgagctggaacagctggtgatctccttcaaccatatgattgggaaaattgaagatgtctttacccggcaggcgaatttttccgccgacatcgcgcatgaaatcaggacgcccatcaccaacctggtgacgcaaacggaaatcgcgttgagccagaaccgctcccagaaagagctggaagatgtcctctactccagcctggaagagtacaaccggatgacccgcatggtcagcgacatgctgttcctggcgcaggcggataataatcagctcatcccggatcgggtgatgtttgatttaagcgccgaggtgatgaaagtcttcgatttcttcgaagcctgggcggaagaacgccacgtctcgctgaaatttaacgggataccctgcctgatagaaggcgatccgcagatgttcagaagagcaatcaataatctgctctccaacgccctgcgctatacgccggaagggaaaacggtaacggtctccatcagaaaacgggataacgacgttgagctggtaacagaaaaccccggcacgccgatcccgcaggcgcatctgccaaagctgtttgaccgtttttatcgcgtcgatccgtccaggcagcgtaagggcgaaggcagcgggattgggcttgccatcgtgaagtccatcgtcaccgcgcaccacggaaaagtccgcgtggaatcggatgcggtgtcgacgcgcttcatcctcacggtgccggggaaagtgctctgagcgtcagcaaaccgcgcggcacacctcaaggaccttttccctgagccagcgatgcgccggatcccgctccatgcgcggatgccacatttgggataccgtaatagtgcgggtcttaaagggcagttcaaagacgtgcacgcgctcggtcatcgcctgattgagcaggtataacgccggtaccatagcaatcaggtcggaggccagcgctacggataacgccgtcgggaatcccggcaccacgctggcgatctttcgtttcatcccccgctccgccagcgcgtcgtccacagacccgtgtaacgccccatcaggcgacgccactacatggccccaggcaacataatcgtcaaggctgacctcaggctgtgaagacagcggatgtcccttgcgcaccgcgccaacaaaccgatcctgaaagagcctttgcagccgtatttcaggccccatgttgctctgcacgccgatctccaggtcgacaagcccctcccgtaaatagcgcgacgttttttcaggtttgggagcgaagcggatgcagaccccgggcgcaacgctcgccaccgcggctatgagcataggtccaaacgccacgacaaaaccgtcgttggcccgaatagtgaacagccgctcaaggctttccaccttcagcgtgtcggtggagggctgcagcaccgccctcgcctcgtgcacggcgcttctggcgcgatcccgggtggcttcggcccagggcgtcagcaccatatgacgcccggcccgcaccagaataggatcgccggtcacctcccgcagccggctcagggtgcggctcatggcggaggtgctcaggtttaaacgtcgcgccgcgcccgccacgctggcttcggccagcaaaacgtcgagcgcaaccagaaggttaaagtcaggatcggacacgatggctcctcagataaggcgttatatgcaacgattaagtgcaaatgctgcgtcttccgccctgtatagcgcatgattatagtttcgtcatcacttttcttatccggagtaacgacgatgacgctatttaccaaccagcccggcgatgaaggtttacccgggcatgaacgcgcccgggtcctggccgccgtcatgaccaccacgctgatgggcgtctttgacggcaccatgatcaacatcgcgctcccctccatggctagagcgatgcaggtccccgcgaacgttgcggtctggttcgctaacggttatctgctgtcagcggcgatgacgctggctattttcgccgcgctggcggcccgcgtgggctatcgcccggtctttctgagcgggcttgccacctttacgctcacctcgctcggctgcgcgctggcaacaacgccggaaatattaaccgggatgcgaattctgcagggcatcggcggggcggcgaccctgagtattgctccggcgatcctgcggtccgtttttccgggccgactgctgggccgcattctggggctgcacgccctgcttatcgcctccagcacggcgatcgccccggtactcggcggaacaatactggacgcactgagctggcaatggctgttcgccattaacctcattccgggcagcatcgccctgctgctggcgtggcgggccttgccgcgggaatcggttgctgacagatcgccctttgatgcgccgggcgccgtgctctcggccgtcctgttaggttccgcgatcatgctggccgacagccttcagcacgtggcgcaacacattagtctgcaggccgtcttctggggcgttctcgcgctggttagcgccctcgcctttacctggcggattcggcgcgcgcaacatccgttactgccgccggtgatgttcagaaacgggcgcttcaccctcgccgcgctgacctcgctggcctcgtttgtcagccaggggatcacgtttgtcgcgctgccgttcctgtttcagagcgtatacggctacagccctgtagtgtccgcgctgctgttcaccccatggccgattggcatcgtgctgatcgcgccgcacgcgggtcgctgggcggatacgatctccgcgccgctcatctcgaccctcgggctgatggtttttgtcggcgggctggtcctgctggccacgttgccggagaatccttccgcctggaatatctgcctgcgtagcctggtctgcgggatggggtttggctgcttccagagtcccaataatcgggaaatgctcgctaacgtcgcgcgggaatatgccagctatgcctccggcgtgttgtcgatcgtcagaacattcggccagtgtctcggcgccgccgtggtgggcgttctgctgggagcggcggcaggatgggaccatcaacatgctatccaggttgcactgtggttagccgtcatcgcctcgatgggttcggtggtatttagcctgagcaggctgcgccctgcggttcgggcatccgcgtaaattgttgcagcgcctctcggcgctgctcgtttttacgcctacgctgcagggcgttcgttccacgcatcagtgtactgaatatttccgtccagaattttccatgtgatttttgcatatcgcaaagatacattttccatgtgaccagtaccgggacaatctcttgtatcatgcattattggagttattgaaatgaccttcaccccttccataagaatattgaagtattccacttcctgaccagcatcattgatgtggtagaactttaattcagcactatgaagcgtttgacctgtagccacagctttgtatagatagggtgaagatgaatcaattgcttttgttagactgaaagcagagtgttgccttgtacctgtaagtttacccgttgcatcatctgttggaatgctcaggttatgaatcagatctctgagctctatacttccttcacggtctgcaacatcagaaccgccacggatcattgctccgccatcgtctttcaaaaagaggtgtactggtacagccatttctataactccttatgttaattaatctcttattccattggctatgaggttaattacaggcatgatcgctacaccatctgcatagaacagatcagaattagtgaatgaataaaccttgccggtgatttttacatttaccgtgttcccataagctgaagcagtaacattgcttgtattggcttcaaggaatggtgatcgatcttcaagggctttcataatgttcccgctgttgtctttatctaaatagaagcggtaaacatccgacaccgtagcgcctccatcatcatacttagttatgtacagtgtgacggaatcagagagtttctgtttgctgacaaaactatcgtgagaaggtgcgttaaaagagtattgatatgtcagaaacccacaaacaacgagcaatagaatcgttgtgagtaagcaatgaagccgtttaataaccgtatttctttgcatattctataccttgccttatccaaaactgatcgtgaggatcatccccataaggcggtttttgataccagtgcccccatttctttttggaggttttagctctttcctgcgcccatccagcacccatcagtagcgtttctgagggtatcccggcagcatagccagccgaaccataattgaagttcccaaaatttgctaactccgggtgtccttgtttgtaatcccacggccccttatttcttactttttgataaaaccaaagataggtcgtagggatagccatgtttctactcataccatgcgctcttgcaatcctcatgtttgccaacacaagtgcgattccttctttaggcaacaaaggtataacagccatattaaccatccatccactgtgggtatgtggccgcatatcgtacacttttgcgatggtaaaaaagatatctgtttccagagaaatgacggaaaaatatccgactaaggtattaatcgcattaaaaatcaaagaaatgtaggctgcgcccggcaaggcctccaggcaagcgttgcacaatgtaggccgggtaagcgcagcgccacccggcaagaaagacggcgcgtttgtttactccaacgccagcagcgcaaagctcgccagccagtgcccgccgctgtagtggctgccaaccacatgcccgacgctggaggccagatgtttcgtcaccgcctcgcgcaatgccggttgcgccaggtggctggcaggaagcgctttcgctatgtgcttcatacaccacgcgcggctgaggtttaacccgtccagatgggcaattttcgggtcggtacgatcgctcacttccgccgggttcatcagtgccgtaacggcgcccacctccggcagaaacgcgtcaaaccaggccgggaagccctccgacaccttgctcatcagcagcgcttccgtcagcgcgccggaaatatactcgtctccgccgggctcataatgagccggatagcgcgtgtcggcgagataaaaccgctccgccgctgccacaatcgcctgttcaagcgccttatcccccactgcgcgaccgtagtcgagcgccagcgcaagggcaaacgcggtgttgtagtgcgttccgacgcggatcggataggtgagcttgccgaggtagtccaccagccggttgcgaatgtcctgggtgagcggctccagcgtctggtaccagcctgcggcctgcggcagcgacgactgtttcagctcctgggccagcgccagcagccagccgtagccatacggccgctcaaacgaggcgcggaacggcgcggtgaaataggccaactccctcgccacgttctcttcggtcaggtgctcgtcaaaaagcgcgacgatcgcgtcccggcacggtaattctggatagaggcgcacgcagcgcagcagcagccagtaaccgtgcaccgccgagtgccagtcaaaacagccgtagaaaatgggatgcagctcgcgcggcggcagcacgtcaccatcatcattcagcaggtgcatgatgtggttcgggtattcctggcgcaaataggtcaaaggcatgcgggcaaacgcgtcagcctgatgttgcgttaattccatgacagctccttagcgaaacacgaggaaatacattaagaacacgttcaccaccagcagggttaacgcggtcgggatctggatcttgatcacctgatatttgtctttcagctccagcagcgcggcgggaacgatattgaagttcgcggccatcggcgtcatcagcgtgccgcagtagcctgcgtacatgccaatcgccagcagtggcgccgggttgccgtgatgcacgttgatcagaaacggcaaggcgatccccgcgctcagcaccgggaaggccgcaaacgcattccccataatcatggtaaacagcgccatgcccacgcagtaaatcaccaccagcatgaagcggttatccgggttcacaaacaggctcaccaccttctgcaccgagtcacccgtgttggccaccacgaacacgccgccaagcatggccagcatctgcggcaggatcaccgcccagccgatggtatcgacaagacgacgggactgacgaacggcatggagcggcgtgcctttggtcagccaccagccggtgaggatcgccgcgacgcaggccacgcacagcgccgccagggtgagctgcttctgatcgagcagaaacacgccgccgaccgaaacgcccttcaggaataacgtgcccagcaccgtcaccaccgggatcatcagcgccggcaggaacagccagtttttaagccgatttgacgatgcgacgcgctcctcctcggtggacattttatagtgccctttcccgacgagaccaaaccccgccagcagcgcgataacgataacgccgccgccaatgatccggtacgccagcgatttccccagctcctgcaccatcagatcgccgaacaggaagatcccgccgaataaaaaccagaacagcgcggtggtaaaacgcttcgggttggcgcgatcgcgcagggtcatgacaaccagcagcattacgacaaagccgatcaggtagtacacgcggttaatggtgataagcgtcatcattgcgcggcctcctgcgttccctgctctgcacgccaggccatcacgtcgcgacgaatgctggcatccaggcgcagcaggcgcgtcatatgaataatcaatgccgcaatggcggttgggatagcccacaggccgatatgcagcggttcgatgccctgaataccgttctctttaaggaacgcgtcgatcagcagcaccgccccgaaggcaataaagatatcttccccaaagaagaccgcgatgttgtcgcacgcggcggcgtgggctttgattttgtcgcggatgtgctgcggcagttcgccgtattcgttcagcgccgccccttcggccatcggtgccagcagcgggcgcaccgtctgggcatggccgcccagcgacatcagtcccagcgcggcggtgccttcccgcgcaacaaagtaaagcatcagaatacgcgctgaggtggcgctggcgatcttcgccacccaggcctgggcgcgctccttaagcccgtaatattccagcagaccaatcacgggcaggatcaggatgaaggtggccagcgatcggctattgacgaacttctcgccaaaggtctccagcagcatcccgaaatccatgccgaccagcagacccgtcgccagccccgccaccacgaccaccagcagcgggttgaagcgcagtgcaaaaccaataaccacgatcggtatcccgatcagcggcagcagcgtagtaccgtccataacgtttaccctatcgaaagtgagcgttgcgcgccgacggctatttttttaatttgcggcgagcgatgttgtgttttgttggcaggcttcgcaaaacctgcgctaaaaagctatatctgaacctcaaaaacatgtaaacaaattatcaataaaatgttcttattttatcgatgagtttacatttctggctaaggaacgttatgacctcagaaaagagtgcttcacccgatcgcgacgatatcaacgagggccggatcgtctcttcccgccatctggtatccgagcgctgcgcggagttatcagagctggaatatgcgctgatcatgaccggcaacgcgtttaacaaatggatggtgcgctgcatgacggctgccggcgagcccgatatgggcgcctttgacgtttcgctgctgcatcacgtcaaccaccgcgaccgcaagaaaaagctggccgatatctgcttcgtcctcaacgtggaagacacccacgtggtgacctatgcgctgaaaaagctggtcaaggcaggctacgtgacgagcgagaaagcgggtaaagagctctttttctctacaacggaggaagggaaagcgctgtgcatgaaataccgggacgtgcgggaggcgtgtctgattgcgatccacgcggagagcggcattgccgggaagtcgattggcgagaccgcgcagctgttacgcacgatctcctccctgtatgacaccgccgcccgggcggcggcgtcactgtaactaaggacggcggaacagcgtaatgctccgtccggcaagcgcgtactcaacggtttcggtgatcgctgtcccggtgacggcatcatccgccgtagacagctccagcacccatcccccttcgccaaactgcgggatctggaacggcacggtgccttcaaacggattgaacagcatcagcacgtcgtgccagatgccgtcctcctgctgaagatccggcctgctgatggagaccccgagcgttgagccttcatcccactgctcggcctgctgcggaccgcctccggcattgaaccagcggatctccagcccgtcacgccagctttcacggcgcagcagcggctgttgcgcgcgaagggcaatgagacgacgggtaaactcgcgcagcgcggcatcgttttcggagagccccttccagtctatccacgagatctcactgtcctggcagtagccgttgttgttccccttctgcgtgcggccaaactcgtcccccgccagcagcatcggcgtgccgtgggagaacagcagcgtggtgaggaagttacgcttctgccgttcgcgggtagcaataatatccgggttctcggttggcccttcctcgccgtagttgtacgagcggttatcgttatgcccgtcgttattgtcctcgccgttgtcggcgttgtgcttctcgttgtacgacaccaggtcattcagcgtaaagccgtcgtgggcggtgataaagttgacgctggcccacgggcgacgcccacgcagatcgtacagatcgccggagccgagaagccgcgcggcaaagtccgtggagacgttgtcccccttccagtactcgcgaacggtgtcgcggtatttgtcgttccactccccccagcccggcgggaatccgcccacctgatagccgccggggccaatatcccagggttcaccaatcagcttcagtcgggataagaccggatcctgggtcatggcgtcgaagaaaccgccgcgcggatcaaacccttcgggctcgcggcccaggatcgtcccgaggtcgaaacgaaaaccgtcaatgtgcattgattccgcccagtagcgcagggaatccatcaccatctgcaacacgcgcgggtgcgaggtgttgaccgtgtttcccgtcccggtgtcgttgatgtagtaccggtgctggtcgggcagggtgcggtaatagctgtagttatcaatccccttaaacgagagcgtcgggccaagctcgttcccttccgccgtgtggttgtataccacgtccagaatgacctcgatgcccgcgtcatgataggcgcgcaccatatcgcgaaagccctggatccccgccgggccgtaatagcgcgacgccggagcaaaaaagcccagcgtgttatagccccagaagttcttcaggccgcggtcgatcaggtgctggtcgtccgggaaccagtgaaccggcagcagctccaccgaggtaatgcccaggcttttgatgtagtcgaccgaggctttgtgccccatcccctcaaacgtcccgcgcagctcgggtggaatggccgggttcatctgggtaaagcctttcacgtggctctcatagacaacggtatgcggccagggtacgttcggccggttgttgtcctgccagtcaaaggcgttcgggtcgataacccggcatttcggcgtaaacggcgcgctgtcgcgggtatcaaagctcaaatccagctcgtcatgccccagctcatagccgaaatgggcgtcgttccagtcgatgtcacccaccagttcgcgagcgtaagggtcgatgagcagcttatgcgggttaaagcgatgaccattttccgggtcgtaggggccgtagacgcgatagccgtacagcgcgcccggcttcaggtcaggcacatagccgtgccagatctcatgggtatactccggcagctccagccgggcgatttccgttttcccggacgggtcaaacagacagagctccactcgttcagcgtacgcggagaacagcgcgaagttaacgcccttcccgtcataattcgcccccaactgctggccatgaccggcccgaatttcaaacgttgtatcctttgccattttcgttctccacgattattcgcaggtaagcagaaccagtacacatcccttttctgacgttaaatccagcgtcttttgcagaatgcggctctcaccgctgaacagatcccgatagcgcttcccggccagttcgtcgggtatcgccaccgtggtattgacccacagctgatgattatccgtgacgccaaaaaccagacgcggcacggcgacaatcagcgcctcctcgtccttaacgcgcgcataaacaatcaggttctcctcccgctcgccggtgaccttaagcggcagccagtcgccgtagcggaaaagcgcgtcgtagtgcggtcgaagccgcagcagcgtggcggtaacaaactgcttcaccctgccgtcacgccagcaggtcgggttgtcaaacaccgtggcatccgccgcgctgaggtgttgcaccagggccggaaagtccggctcgcgtcggttatccgggtcgacaaggctgaagttaagcgcctcgctgccctgataaatatccggcacgccgggcgccgtcagcttgatcgccgtctggctgaggctgttcatcagcccggcgcgaataaagggctgcatcgcctcgctgaaatcgtgcaggaacagggtgttgtccggcgaaagcaggtgccgcgcgtagctcaacaccacgctctcatagctctcgttgctgtcaatccagtcggtgcgctgtttcgcctcgcgcagcgctttttcgaggaagccgaggaaccgcgtttcgagtgctttaagcccttcagcgtcgtccggtgacagcgtggcgggccagacgcccgccagcgcctggtagatcatccacgtatcggcggcgttcggcgcggtaccatcattgagaaaacgcacctgagtctggttcatctgccgccagcgggccagattttccccccagcgttccggggcttccgtcagggtgtaaaggcgcgcccgggcatcttccccgcgcttggtatcgtgcgtggaggtacccagcagcgcgtcgggctgacgggccagacgaatgcgcatctcctggtggaagcgggataaggaaaacgcgcgcggggtcgggtcggcccccacttcattgagcgcaagctcaaggttgtggcgaaagaacagcgtgtcttcaacggacttcgccatcagcggcccggtgagctgctgaaagcgggtcctgaacagcgcggcgctctcgcggcatgcgtccggcaggtcgccggtaagaatgcgcacgatcaggctgagcgcggcttcagacgtctccacgctggcaaccacgcggttgagcagcgccacgtccggcggggttaacccctcgcgagtgccgtaggtgcggtagaccggaaacgtaataagcagctcgcgcagcgcgtggcggatatcctcgcgcggcagcgcaacctcattgcggcgggccagatcctcagcaaggtttagcagcgtggtgaattcaccctcaaaattgcgatcggtcatcaggcctttggcatcgcgcagctccgcgtggcgatcgaccgtcacgccgagcgtttcgtcgtggattgtctccaggcgcgagaggttatcgtcgtcgaccagcacctccgccagcgaggcgataaactcgtagccggtggtgccggataccggccagtcagcggggagctgttcccctttggcgagaatcttttcgaccgtgatgtagcagtcgggcccggcggcctgccgcaggcgctgcagatagcccagcggatccgccaggccgtcgacatggtcaatgcgcaggccgtccaccacgccagcgtggaccagctcaaggatcagccggtgcgtatcgtcgaagaccgcatcatcttcaacccgaacgccgaccagcccggtgatctcaaagaagcgccgccacgatagctgcttcggcgcctcccgccaggacatcagccgccagctttgcgcctcgtgcagcccggcaatgcttttttcctcgctgtacgtgcccgggttgagcggatactcggcgtcatagtagaccagggcggcctttttcgtgacagggtcacgtttcaaggtgatggcacccttctccagctccgcctcaaaggtatcgccaagaaacggcagcgtcagcggcctcgacccgtcgatatcaaaatagcggaaatagcggctttgctggccgtattcaatcacgtcccgccaccagaggttttccagcgaggtggacatatggttcgggacaatatccagaatcaaccccataccggcctgcttaagcgccgcggccatgcggtcaaagccttctcgtccgccaatcgcggggtcgatttcattcgggttagtcacgtcatagccgtgggtagaccccgtcgtggcagtgaacacgggcgacgcgtaaaggtggctgatgccgaggtccttcatatacggcaccagcgccacaacgcggtcgaaggtcatgccgttacggaactgaatacggtacgtggcggaagggatcataacgatgcttctccatcagcaaagcgaacgacaataccgttcgggggtaaaacgtcgttgagctccggccaggcgaagcgcgtctcccccgcgagcgcgggcaggtcgacgggcttcgttccaatattcagcgccagagaaagcgtgcctgacgggaagcgccagctcaccgccaccatgccgggcgcggtcttgagcacatggccctcaacggcaccgcccggatgcagaagcggaacgatatagcgatggcgcagcgtcaacagatggcgcgtatagcgcagccacgttttgccctcgtcggtggcgattttgttccagtcgagctttgagcggataaacgtgttcacgtcgttcgggtccgggacagtttcatcgtgcccggcatggccggtgaactctttcgcgcgcccttcccgcaccgcctttgccagttcgccgtgaaagtcggtgaagaacaggaaaggatgtgtttcaccaaactcctcgcccataaacagcagcgggatatggggggaaagcagcagcgcggcgagcagcaccctcgttttatcagcccccgcgagggagataagccgctcgccctgggcgcgattgccggtctgatcgtggttttggatgaaatcgacgaagaactgcggcggctgcgtgcggcattccaccccgcgggattcgccggtttgcagcgaaatctcgccctggtagacaaagccttccgccagcgcccgggcgaactttttctccggctcaaaggcaaagtcctggtagtaggcgtgcgtctccccggtggcaaacacgtgggcagcgttgtgaaaatcatcgttccattcgccggtaaacagcggcgtgtggccctgttcatcgcgcggatgcagaaaaatcacgttgcggctgtcttccgtggtcaggtgaacgtgccggtgcgggatcgcctcgcggatcttcgcggcaatctcctccagaatgtgcgtcccggagctgtctttaatctggtcgatggcatcaaagcgcaggccgtccagacggtactccgtcagccagtagagcggtgcgtcggtgatgtactgcctcaccggctcgcgctcgtaggcgatgccgctgccccacggcgtcattcgatgctcatcaaaaaacgcgggcgacagcagaggcagatagttcccctccgggccgaagtggttgagcacgatatccagcaccacggaaagccccagcccgtgcgcggcgtcgataaacgcgtggaaatcctccggcgtgccgtacgcagagtgcggggcatacagcagcaccccgtcgtacccccagccgcgggaaccgccaaactgggagacgggcatgacttcaagctgggtaatccccagctccgccagatacggcagcttgtcgatcgccgcccggaaggtgccctccggggtaaacgtgccgatgtgcagttcgtaaatgatcgtctcttcccacggccgccctgcccagtcgcggttgaccggctggtaacgtcggggatcgatcacgactgaggggccgttaacgtcgcccttttgcgcccgcgaggcgggatcgggcaccgccgtgccgtcctgaagaacaaactgatattctgcaccgtgcctgacgccggggacgtccacctgaaaccagccgtcgccggttgccgtcatcggcacgtcggtggcggcaagacgtagcgtaagttctttctgtccttctgcccagacgcgaaaacgtacaacgtcatcggaaataaactcagcaccccactgcttttgaaatgtcctgaattccattcattgtcctcgaatgacccacattttacgcggaacgaagtacaagcttagttcaggattaaaagtgcgtgagctcagcggatttaaccgcttcgtctattctttatgaagtaactcactaacgggaatactatgcagattcgaaaaggactcaataccgacttcgcacgccttgaatgctgtgacttttctttcaccattagccacattgcccgggagccgtttatccactgtgatttgcatattgaagccgtggcagagccctggattaaaacctacgaactcgacattcaaacgcttgaaaatcactgcgttaatccggacgccatatttcttgtcgcggaaacggacgacggtgaaatagccggatttattaccgcgtcagtcggctggaacaaatttatttcagtggattatatagccgttgagcgctccaaacgcagaaccggcgctgcgcataaattaatggccgccgcgcacgtgtgggcccgcagcgtaaacgcgccgggattacggcttgaaacacaaaatgtgaacgtctctgcctgcctgttttaccgtcactacggatttaccctgggcggatacgatcgttatctctgcaacgccctaccggaaaaagacgaggtcgctctgttctggtattacatgctggtctagcggaaacacattgccacatcacggtcatatttctgtcactgaatttcattacgctttcgggattttaaccacggtgttgaggaaagaagtgtgaattcaatggctaaggcattactgctggcattaccggttttgagtgcaacggcagcggcgacggctgccgggcgcgacctgtgtgaaccgaaagcgtacgaaatggcgctgcgctatcagcagaaatcggcagagattatggcccttcagctgcaaacctatcggtttgccaccgagcgttttaacgaaaagttaaaggatctgaaaacgcccgaaaattacgccgtggtaatggacctggatgaaacggtattggataacacccctctgctggtgcgcgacatggagcagtgtcacgactatacgaaatgggacacctggagcgactgggagaaacagggaaaacccggcttaattccgggggcgaaagcgtttcttgaccacgtgaatcaaagcaaggtccgcatctactatgtctcggatcgtatgcaggaaaacaaagccgacacgctgaagacgttaaacgctctcggcctgccgcaggtatctgacgaaagcgtgctgctggatacggtcagcaaggaagagcgccgtcagagcatcctcaaaaagcagcagatcgtgatgctgttcggcgacagcctgccggatttcgccgtgcagtttaaaaacaaaaagccgagcgagcagcaacgtgaactggttgaggccagcgcggaacacttcggcaacgactggattgtgctgcctaatgccgcttatggctcatggtccaaagccacgccggacagctggaacgcaccgctgaaaaaataatgtctacgggccgggaaagctatcgcgcgccttcccggcccttcggtttcctatccatcccgtttataggtcctatcatttctaagcaggttcttataattttacggagcagtaagatgagcactttcaaaggagactcgtatgcttaccgtgaaaaaacttgctctttccacgctgatttccagctcactgcttttctaccctgcgctccaggcctctgctgaaacgccgcagcacgtcgttaaacaaccggcgggcggttacagcgtgcaggtcggcgacgtgcttgtcacctcgtttaccgacgggaccgtcgcgcaggatctgcacaagctgctgcgccggacaacgccgcaaaacattgatgcgctgctcgcaaaaaatttccagaccaacccggctgaggtctccatcaacgcgtttctgattgcgatacccggacataaaatcctggtggataccggctcgggccagctctttggtcctgataccggcggacgtctggttgagagcctcgccacgcagggaataaaacccgaggacatcactgaagtcctgctgacccacgcccactccgatcatgcgggcggcctggtgaaagacggcaaggtggtgttcagcaacgcgcgcgttttcgttggcaaaccggacatcgactttttctttaacgacgacaatcagaagaaaaccggctacggcaagaactacttcgacgtcgcgcagaagaccttaaagccctaccttgacgcggggaaagtggtgccgtttagcggcacatcggagattcttccggggcttaccggcacggttcatcccggacacacgccgggttcagccttctacaccctgacaagcaaaggcgagaagatcacctttgtcggcgacatcattcacgccgcggcggtccagttcccgcagcctgcggtgaccatcacctacgatgaagatgagaacaaacggcaagcgtacgcgagcatgcgttcgctgactttgtgaaaaataaggacctcattgccgcgccccatctgcctttcccgggcatcggctatgtgacgaaaggcgagaaaggcggctatgcctgggtccctgtgacctataccaaccgggacgccagcagcgcgaaataagatgacgcggatatctgacatggacatagacctgctcctgacgctggatgccctgcttcaggacaggaacatcacccatgcggccgcgcggctgggcatcagccagcccgcgttgtccgctcgtctcgcgcgtctgcgcacgctgtttggcgaaccgctgttcattccctccccgcatggacgcggggtgttacccacgccgcgcgcggaagcgctcaggccgcaggtgacaggcttgctgcgcggcatcagcgcgatgtttgcgcccaccgcgtttgacgcgcaaaccagcagccggacatttgttatcgcgctgcatgaaaacccggcgctgatgctcggcaccgcgctgcttaaccaggtgggtaccgatgctcccggtattcgcctgcgcttcgccctgcccgagatggccgaactgccgcagcagctggagaacggcgatgtggatctctacatcggcgtgagcgcgggcgcccatgacgggtgggtaaggcgcaaactcctcgacgacgcgtttgccaccgcccagcgaaaaggccatccgcgcggaacgggtgcgttagatctggagatctactgcgcgctttcccatctggtggtgtcgtcggcgggcgatccgtttaccggatttgtcgaccaaaccctcgccgggctgggctatcagcgacacgttgccatgtccacccagagctacgctatggcgcccgcgctggttgccggtaccgacctggtgtgcaccctgccggaacggatgctgaagcagtttgccagcacgctggatctttttgcaccaccgctgccgctccagcccattaccatcaacatgtactggcacccgaaaaacagccaggatccggcgaacgcctggctgcgcgggcagctcctgcgggcagcaggacgtcaggtgtgatcgagcgtgaccagaaacttttttagcacctctgagcgaataatccggtggcaaaccagggtgagttcgctctcccgcagccggtcaaggatgtccacgtagacgacgttctcgacgctcaccgcctttgccgacgcgggcagcagcgccagaccaaaccctgccgaaaccaggctgatgaccgtgggcacgtcggtcgcgttttgcaccacgtccggctgaaagcccgccccgctgcaggcgtcatagaagtactgctccagccccattccctccgggtcgcgcagggagatccatttttcgtctttcaccgacgaaagcgtcagcgcggcggacccggccagcggatgctgacgatacagcgccagcaccgttttctccgaggcgaacgggcggctttgcagatcgtccggcagcgacggcagcggcgcgcggatgatggccacatccagctggttgctctgcacggcggcgtagagcgtctgcacgtttcccgtcatcagcgacatggtaatggcgggccagcggctgtgcatctggcgcagcgcggcgggcagcctgccgtcaaacatcgcgctcgacacgcacccgaggtttaacacaccctgctcgccccgtgccgtttgtctggcgtccagcaccgcctgttcggtcagcgagatggcaagccgggctttcacgagaaatgcttcgcccgcgggcgtcagggtcaagcggcggttcgcccggctgaaaagcgtgacgcctaaacgttcttccagggcctttatctgctggctcagcgccggctgcgccatgttcagacactcggcggcccggtgcatatggagctcttcggctacgacgatgaagtggcgcatctggcgaaactgcacgagacgacctcctgaattgatatgaatttacttatcaatttaacagtaatgatgcaattgatgctattggtcattgccttaaaaatggaggtattcaaccgagggaggaaaatatggaaaaccagattaacgatctccgcagcgccatcgccttactgcagcgccacgaagggcagtacattgaaaccgatcgtccggtcgaccccaacgcggaactggcgggcgtctaccgccatattggcgcaggcggcacggtcaaacgtccgacccgcacgggcccggcgatgatgttcaacagcgtgaagggctatccgcactcccgcatcctggtgggcatgcacgccagccgcgagcgcgcggcgctgctgttgggctgtgagccttcggaactggcaaagcacgtcggccaggcggtgaaaaagccggttgcgccggttgtcgtcccggcctcgcaggccccccgtcaggagcaggtcttctacgctgacgatcctgacttcgacctgcgcaagctgcttccggccccaaccaacacgccgattgatgcgggtccgttcttctgtctggggctggtgctggcaagcgatccggaagacagctcgctgacggatgtcaccatccaccgcctctgcgttcaggagcgcgacgagctttccatgttccttgccgccgggcgccatatcgaagtcttccgcaaaaaggcggaggatgccggaaaaccgctgccggtgacgatcaacatgggtctcgaccccgccatctacatcggcgcgtgctttgaggcccctaccacgccgtttggctacaacgagctgggcgtcgccggggcgctgcgccagcagccggttgagctggtacagggcgtagcggtcaaagagaaagccatcgcgcgggcggagatcatcatcgaaggtgaactgctgccgggcgtgcgcgtgagagaggatcagcataccaataccggccacgcgatgccggagttcccgggctactgcggcgaggcgaatccctccctgccggtgatcaaagtgaaagccgtgaccatgcgaaaccacgcgatcctgcaaacgctggtgggaccgggggaagaacataccacgctggccggactgccgaccgaggccagcatccgcaatgccgtagaggaggctattccgggcttcctgcaaaacgtctatgcccataccgcgggcggcggcaagttcctcgggatattgcaggtgaaaaaacgccagccgtcagacgaaggacgtcagggccaggcggcactcatcgccttagccacctattcggagctgaagaacattattctggtcgacgaagacgtggatatcttcgacagcgacgacatcctgtgggcgatgaccacccgcatgcagggcgatgtgagcatcacaaatattcctgggatccgcggccaccagttggatccgtcccagtcgccggattacagcacctcgattcgcggcaacggcatttcctgcaagacgatcttcgactgcacggtgccgtgggcgctgaaggaccgcttcgaacgggcgccgtttatggaggttgacccacgcccgtgggcgccggagctgtttgctgacaacacgaaatagaaacagcacgcgtatggcccgcaggtcatacgctgattttcttttcaagcttggcaatattttcacccgccgctcgctccaccgagaaacgatcgacgctcagcaaaatgagcatcagccccctgccgctctccagcagcggcgagatttcacaaaaacggtctcgcctggcggcctcaagccgcgccagcgggaacgcgtcgcccgcgtcggtaaaaacaatgcagacgtcgctgtcgcggatatcgaagcgtacgctgaatatgcgcgaggcatcctcatgcagcgcgtgccggatgatattcgtcgccacctcacagacggcgagatcgagcgcgaaacgccactcatcatctacgggaagcgcgctcagccgcgcttccagccagccggccagcggcgtcagggaaccgagcaccgccggaaattctgcctgcaccggcgtctgcatctacagccccagctgcgcaagcgcgctgcttttgtccggatagatgcggaatatgcggtccatgcgggtcagggtgaacatgttcatgatcccggggttcagagagcacagcgccatgtcgcctttcccgttcatcagcttaaacaacgacaccagcattcccagcccgctgctgtcgataaaatccactttgctgaagtcgacaatcaaagccttgcgatcgtcgccaatttcttccgtcacggacgctttaaacgtcgcggcaacggaggcatccagccgccggactgcgggcgtgaggatgttggcatgcggtagtcgttcagtgttaataatcattctgttctccctgacgctcgatcacgagcagtgaaacgtcatcggttaaggcggtcggttcatcacgatttgcgttgcgccagccggtcaggtggtcaccgaaccgcgccaggagctggtcaaccggaagtcgcgcatggtcatgaagccagcgttcgagacgctgcgggccaaactgctcgccgctgacgttctcacactccgtaataccgtcactgaataagcataagcgatcccccggattgagggtaaacgcgacgtcctcccagttgaggtcaggcatcagcccgaccggcgggccgccattgcccacggacgtgacggcgctgtctgcgttcacaatgacgggagttggatgcccggcctgacacaacacccctcgtccgctctcggggtcgatcaccccgtagataatggtgaaatagctggtaatgtcgctctcttcactgcaaaagcggctgttcaggattccgatcacctcggcaggcgactgaatgccgccctgatcggtaaacaaaaaacggtctaccacccggccatgtaagaactgacgcgccaccgcgagggacatcatcgcggcccccacgccgtgaccggacacatccacgcaatagaacccaatgtgagaatcgagtggaaaaatattgaacacatcgcctgagacccacgcagacggcatgaaaagccagtcggaaaagtagttcccaaagcgtaagcggtgcgaaggcagcacggagtgctgaacgcgcgccgcgagttcaagatcctgttcaatctggtgcaacgcttcactcaggcgcttgttgtgcgccgcgagggtcgcttccagcgttaaaatacggcccccggcgtgcagacgcgcccgcagttcatcctgttcgaccggcttgcttaaaaaatcatcggctccggcatcaaagccctgcgttaaatccccggcattttcgcgtgccgtgagcagaatgacatagacgtagtggccaaactgacggttgcggatggtctgacagagcgtgagtccgtccatttccggcatgtcccagtcgcttatcaccatgctgatcggctggctggacagtatttccagcgcggcgacgccattttccgcctcgctcacgatatacccccactgggtgagcattcgggagagtaaccgacgataaatcagcgaatcttcaacgattaacacgtgcagcgccgacatacatccctcctaaagcggtaagaaccagatgaggctcacggtcccttccctgaattttgcattcccgttgccgtgccccggatagcgcgttcccgcatagttcgcgtactggatggagaacgaacccggcgtatagccggcataaccgaagctgtagctgtaatcgccgttccagggctgctgctggctgctgtccgggaaccagaatgccgtcgcgcgaacgaagaaatgttgtttgaaggtgtagccgcagccgccgagcatgacgtttttatttttgcggatgtcatcgctgctgaggtcgtagtagcgcggcacccagctgtacccgacctggcaaatgatggaatcccctttattaatcaggagcgtgttttcgaccggtttcggtagcgaaaacttgtaggccagcgtgaaggcgccctgttcgaaataggtgtgtcgtcggctgcccgatgtccagaaatggttatcgccgtagttgctgtaaaccaggctgacggtgttggcgtgccagtcatcgtagccgaagctgtagcgaaaatcggcggtgtagcggctggtgtctctgaccggcagtcgggacgtaatgttggcaaaccagaagctgtagggggaatactgaaggctgagattcagcgtctggttaatctttttcttttccgtggcggtgtctgaactgttaggaatgctcatccactgctctttcagtcccgagctaaagctcagcgcacctgagaatttcttgtcgttacccgagaacaggcgcccccagcggctggtaaagacgccagcctgaacaggttcaccgttcttatcgcgcagggattcattttcactgcttttcgccgcctctgcggcggggatcgcggcgagcagcacgcccgccagaagccatttttcgcgcataaccgccatccttagttaggtatccagcgtgcgccgacgtcgtattttgccatcagccacaaaatacccagtgccgccgcatgcactaacgtgttctctatccaggcatgtcgccataagtcgaaggtgatgaactggctcaccagcagcaccacgtacacatgcaaaataaaggtataaagcgagtgctggccgagcgggatcaggaaccatcccagcaggcgattgagcggcgtccagcaatacgtcagcaccaggtagacggtgaccatcagggcgatatcgtttagcaccctcaccgggcccagcccgttcttcgccgcccaggtgtgataaaacgaattgaagctgtcaggcgggatgacgtgcatcagcagcgcgggcggcataaacgggttggtatggttctgagcgacaaatcccagcaccagcgacaccatgaccagcgccactaccacccctttccccggaggcgtccgggcgaaagagagcagttcggctttataccagccgctggccatccccagcacaaagatgaactgccaggcgagcagtgggaaggcaaattcgaactccgacggcgtcagccgaagcggccaccgctgccacaggctgtacaccagcagcgacagccccagcagccaccagactttccctttctgcaacatccctaaaaaaagggggctaaagagcagcaaaaagatatacagccccagaatctgcgtctgatgggggccgatctgcaaatagagaataatgttgaaccaggtctctttaatttgcggcgtaaccggataaagcgaccagctttcacccgaaaaacggtcggtaaaatgggcgacctcgaaaacattaatatgtgggatataggccagaagaataaacgacactatgataatgatatttacacgatatattttccatgccctgagataaagcccccaggaaaccgtgagcaaaaccactttttgcagacgcgcgcggttcagcatgccaagcataaaccccgagagaataacaaaaccttctgcgccggttgttaacccaaaacgctcccaggagaatatattaaataccgacatcacctccgtatgcgccacgaccatcatgacgagggcaatgccgcgcataaagtcgattatcaggtcccgggcacctgcaacggcataccgccatgctgttgatttagcgtcatcttcttgcgctaccgacggcgcaacatggctcatagggtgtcctttgcctgaaaacgaaaattaaggtctaaataaagtagatagcctaaaggaatagtaaccgcaatttatcgacgaccgatgaaacatcattaagcagaatttaagctgaattaaccaccgctaaatattaataaaaacgtggctggacacttttattcggcgttctacacttatcttaaatcttgtttaatcgctattttctttcgcttttgggcaactgtctgcgcagcagaatgggtctgcattttcacggaatcaggaacgccggaactatggatttttatttttcccgttttgaacatcgtcgtcctccggaaccgttaacaacaccgcgctgggtcatgttcacctggcaggtgttagcggtcgcggcgcttattctgggtgccaattatatttactggcgctggaccgcctccctgaatactgacgcattatggtatgccattccgctggtccttgccgaaaccctggcgtggattggcaccgtgctgtttaccatcaatttatggaaagaacaggatcctcctcagagtccgccgcccggcgaaattaacgaatgcctgtcgcctgaggaggccgtagagccccgtcccgtcaaggtggatctgttcattgccacctactccgaagacaccgagctggtcaggctgtccattcgcgacgccctgaagatggcgtacccgttcccgattgactaccgcatccacgtgcttgatgatggccgccgcccggagatgaaagccgtttgcgaagaagaaggcgttaactatatcactcgccagaccaacatcggctttaaggccggcaacctgcgcaacggccttgagcaaaccgacggcgattttattgttatctgcgacgccgacacccgggtatttcccaccctgctcagccatacgctgggctattttcgcgatccggacgtggcctgggtacagacgccgcagtggttcttcgatcttccggaaggagaaaacctgtcgcgctggggccagcgaaaagccggaaaagtgggctacggtctgggctggctgattcaaaagtgtgttggcccgatcacgattggccgcgacccgttttttaacgatccgcgcatgttctatgacgtgatcctgcggcggcgcaactgggcgaacgcggctttctgctgcggcgcagcgtccattcaccgtcgcgaggcggtcatgcaggccgcgctaagaagctatgtctggtccgtcgaagaggagatccatcgtcatacgcgcgacattcgcgatgaggagacccgggacgcgctgcagaatgcaatgcgtccgcacgtggcgtttgacaccgagcttaccccctacaaattccacgtctcggaagatatttacacctcggtgctgctgcacggtgacgccgcacggcgctggcgctcggttatgcatccgcgggttgagtcgaaaatgctctctccgcaggatatgctcacctggatgatccagcgctttaagtacgccgccggttcgctggatattttgtttcatgacaacatcttcagccgtcgccgcttcaggctttcactcccccagacgctgatgtatgccaccaccttctggtcttacatggcctgcgtgtggaacacggtgtttttgatttcgcccattatctatctgtttaccggcattccgccggtgtccgcctggtcgacgccgttctatctccactttctccccttttttatcttctctgaactggcgtttatgttcggcacctgggggatctcggcctgggacggcagggcctcttacctctccttcttttccatgaacctgcgcgcgctcaatacggtgctgcggggcgaacagatcaaatttcacgtcacgccaaaagagcggcagacgggccgttttctctacctggtgaagccgcagattgccatcgtggtgctgaccctcgcggggcttatctggggcggtatccaggtggcgcgtggacaggtggacgacccctccggctacgtcatcaatattttctggggaggggtgaacatcgccgccatgctgccgctgattttcgcggccatgtggacgcccgctgaagaggacgaggtcactcaatgaggatacgtgatgccctgctgcccgcgcgcagctacctcaccattttgctcggcttcctgatcggctttgccattgtggtctgggtggagaaacagatgcctacgcgcgtggaaagcagcggcggcatcgcgctcagtaaagacttcccgccgctgcccacaacacgggcgctgacctatgacgaagccatctgggcgcgggtcgcctggcaatactacgtgaataatacccagccaaacgggctggcgaacgccagcgacggtgaaccctggctgagcctctggagcgtgggaagctacctctttgcgaccgctgccgcagagcagctcaatattatttccgccgatgaattcgacgagagggtcggcacggccctgttcacgctggggcagttaccgctcaacaagcaaggcctccctgccgcgtattaccatgcggacaccctgaagatcctcggcaaacccgacgcctcggcaattgggctgagccgcctgctgacggcgcttcagaccctcctgtggcgctatcctcagcacgcggcggctatccacgatctgtttagcctctggaacaccggcgcactgattaaaaataacgttcaaagtcaggcggccgttccgctccatcactggacgctgaccgatgacgaacagcgggacagctttggctaccgtctctatgccagccatacgctgcgcctgattgacagcgcggcaggactcgcggtgaccaacccgcctgaagggcaaaagatgatcgatctggatggcgtaatggtgcccgatgaagggctacgcacgccatggggcaagcaaacctccctgatcagtctcccctatctgttaaccggtcttgagctgggctttgatgcgcagagcgctgaaatcgcgtggcggattatgcagatccagcagcggcgccacggcctgcgcgcgccaaaaccccccgtcagcacggattatgccgaacccgcgccggattacgttaacgatctgccggacaggcagccggtacaggcgcgcaacctgcgcgacgaggtgccggagaaagtggcgatgacctccacccgcaccgcgtttgcctggtatgccctgttccgcaacagctggagcgaagcgctgcgccagcaggttctgccgcttcaggtgccgggtaaaggctggcagcgcgggttaaatctcaacaacagcgtcaatgccgtcgtggacgccgataccaatgccattgtgctggaaagtctgtcttacatcgcgcatggccagatgctctgtctggcctgcctctacacttccccctcagcaggagcaacgccatgaagccacgatccccgatccttttacacctgctcacgggaataacgatctgctggctggcgctatcgaccgtgcgtgcggacaccgagcttcctgcatcaggttactccccgcgcagcggcgagctgacggcccgagagatgaccatcgccaaaaacgcctggcagtatttcgtcaccaactatcagcccacgacgggcctggtgaatgcggtcaacaaatatccctccaccaccatgtgggacagcgcctcctatctggccgccctgacggcggcgcgtgagctggggatcattgataaagcggaatttgaccgccggatgctgaagtttctcgccacgttaaacaccctggtactgttccgcaacgagctgcccaacaaggcctataacaccatcagcggccagaaggtggactacaccaacaagcccggcgaaattggcttctcggcgctggatatcgggcgaatgctggtctggctgaaaatcatcaaggagcgttacccggaatacggcaacagtattgataacgtggtgctcggctgggatttcagccacgcgatcgacccctgcggcacgctgtacggagcctatctggagaacggccagccaaagtacgttcaggaaggtcgactgggctatgaagagtacggcgcggccggtttccagctgtgggggttcaatacctgcaaagccaaccgtccgcagccttacgagctggccgagatctactgcgtgctggtcccgtacgatacgcgcgacccgcgcaacacgtcgcagcataactacgtggtgacggaatcctacctgctctacgggctggagttcggctttgataaaccgaccgaccgggataacgccccgcgcgactactccctgacgtggatgaaaaactttgccgaccgcgtttatcaggctcaggagaaccgctataccattaccggcgtcctgaccgcgcgctccgagcaccagctcgataaggccccttacttcgtctatgacaccgtcttcagcgacgggtacaactggaacaccattaccgataaaggccagttcgtccctaacgctgccgcgatttcgctgaaggcggcgctgggcatgtgggtgctgtggaactccccctataccgaccgcctgctgaacaccattgagaatgccaacgaagagggaaaaggctactacgaagggctgtatgaaaacggcgacgggccgattaaagagttcaccgcgaacaataacggcatcatgctggaggccctgttgttcaaaaaagaggggaaactgctggccttcaacaccgacaacccgaagagcaaagattttgccccgtctctgtgggatcgaaagctgctcgatcagtttgaagagaacaacgcgctgcgcagccgcccgttccttgccagcaccccggccgtaaaaagctggtgcgaccggaccggcgtcacgcagcgcaccaaacccgcctgccaggcctgtcagtgcgcgtcatgcagcgtggacgagcccgttaaactgcctccggtgactgcgcaatgcttaaaaccatagccagagggcttgcgggattactccttgcaggcgcgatcgtctttgcgctgtttgcccatcagggcgcaggctggcgctggctcatcagtggcggctggcactccagcgcgcgcattgccgccctgacgccggaagagcagacgtgggcggcgatcgcctggcgctatttcgtcaataatacccagccgcaaaccgggctggtcaacggcagcgacaaacagccccgcgtcacgctctggcaaatgggcgatacgcttatcgccctgctggcggccaaagagctggggctgattgaggaggccgagtatgacgctcgcctgacgcggctgatgggcaccctcaaccgcctgatgctgaccgaggcccggacgccgggccgactctattccagccagacggcgacgccgatcgactttagcggcaagcccgttaaaaatggctggtccgcgcgcgatatggcgcgtctgatgctcgccctgcgcctcaccgcagagcgggaaccgcagtacagcgaatacctcgataaaatcatcctgcgctggaatttctgtccggtcatcgacggcgaaggcgaactgtggtcatcttccctgcaaaacggccagccggtggtacgcgaggagctgcgcctgggcgagagcgaatatgccgcaacggcgtttcagctgtggggattttccccggagaaagcgtttacgcccccggcgcaccacgtcatcatcgcccagcggcgtctggccgtcgatgcccgggatcgcgcaccacgtggcagccctctctgattaccacccttccctatatgctgccgggcctggagtttggctgggagcccgaaggcgccctggcatatccaggatacggtctggggaaatggctatgcctggaactctgtcggcgacgatggccgggactacacccgtttcgcgcaggtatcgaccaaagcggtctttgccctgtgggccctgtgggacaccccgtacaccgacgtgctgatggcggtgacaaagcatcttaacgatccgcaaaaaggctggtacgaaggccgccaggaagccacgggcgatactaacgctgcgctcaccctttccaccaatgccacggtgctggaagccctgttcttcaaacacaacgcgggccccctgtttgacgcccgccgggctaaaaaagagagctactttacgcgccgtgtggcagatgactatacgcccgtcgggcactgtctaccgggcgaaaacgcagtaaggaggacgccgtgaaattttaccgcgatctgtttgaatccagtctgaaccgcgtctttccggataatgataaaacggcgttttttcagacgttctatgacgccttcgtccatatgtcacccgagacggagcagcatttttctcgcctgccggatagcgagggtcagcagactctgtttaagagtttcttcgccatgcttgcggtagacggcgcgttaatcgtgcctgattttctcgagcgcctggcgcgggagcaaagtgacgacggtctccacctgcccccgcgttttttcgccctgtggcgcgaagcgatgttgaacactgtgagcctgcgcgatccgcagtgcgacgatgagatcctgacggcctgggccatggcgatcgcgcccgggctggaatacctgcgccgacaggcagaactgcactaccgcgcgtaggaggatcacgatgagcgcattcacgtacgatcttaacgcgctgccggccgccgtcatgatttatgacgccgaggaacgcctgcaggcctggaatcacaacgtggcccttttttatccggtcatcaccccgtggctgaaggtgggcacaacgctggcgtcgctggcggaacgctttatcgacgccgtttacaacgtcgaccctggccttcgccagacgctgcgcgagtcgatcgtgcgcaactgtcggcaggataaacactgcgaagtgcggcaggcaggccagcggcggatcttcgtccagcaccagcgccttgcggacggcggcattgtcagcctgcacagcgatgtcacggagctggatgaagcgcagcgggcgcgtcatcagctgcatgacgattttctgctgacggcagaatccatccatatcgggatctgggactggcaggtgtctggcgacacgctccaggtcaacgataccctgcttgccatgctgggccagtcgcgcacccagtggcgatatccggtgcgttttctgctcaatcaggtccacgagaacgatcgcgctgcgctgcgcaaggcgctgcacgcgtcgaagcaggatcatcgtccggtctttgaatgtgaaattcgcgtgcatcaccctaccgaaggtctgcgctggatgctgctctccggccaggtggtcacgctctccattgagggaaacgccgagcgcgtgattggcacgctgcaggatattacgcgccgcaaggaggctgaaattcaggcgttcgcctcggccattgaggcacaaaaagccaatgaggcaaaaagcgcgttcctggcgaatatgagccatgaaattcgcacccccatgaacggcattattggcatgacccagctgtgcctcgatacctctctcagtgccgatcagcgcgattacctgacgctggtgatgagttctgcccagtctttgctgcatatcatcaacgacattctcgacttttcccggattgaagccggcaaagtggagctggaggcggagcccgtcccggtccgccccttcattcagtcgcttattcgcccccacatgccgggggcgagcgaaaaaggcattgagctgctggtcgatattgcgcccgacgttcccgacgtgctgctggtcgacggcgcgcggctgcgccagatcctgaccaatctgctgggtaacgcgctgaaatttacccatcagggggaagttatcctgattgttgagcccgcggatagcgcggatcgatggcgtttccgggtgtgcgacagcggcattggcataccggcagataagcagaaagccatctttgaagccttcagccaagcggataactcaaccacccgacgctatggtggtacggggctcgggctaaccatctctgcgcgactggtcgcggcgatggacggcgaattaacggtctccagcgagccggggaaaggcagcgaattttccttcgtgctaccgcttgcggcccaggcgcccggcccggaggaacgccggcatagccatcgctttaacggggaacccgtgctggtggttgatgataacgcgaccaacctgcggctattggccgccatgcttagccagatggggttgaaacccacctgcgttaataatgccagcgaggccatcaaccgggttaaaaccggaacggcatggcccctgatcctgctggacgcgcagatgccggatatggacggcgtgtcgctggccctcgaactttcggtgctgccgcaggttgctgagagccacatcatcatgctgagctccatgagccgacattttgatatcaatatgctgaagcggatcggtatccagaactacctgcacaaacctatcgcccagaatgaattgcatcaggcgattgccgcggcgtttgaacgtgcgccaaagacggtgagtgaaagcgcgcccgcgcccaccgtcgcgccggacacggccgggctcagggtcctgcttgcggaagataatctggtcaaccagaaggtcgccgcgcgcctgcttgagcggctcgggcacacctgtcagatcgtcgataatggcgtcgcactgctggaacgctggcgcgcgggcgtgtgggacgttttgctgatcgatcttcagatgccagagatggacggtgagaccgccattcgcctgctgcgtgaagaagaacgcgcccggcccggcccggcgcagcccaccgtcgccatgacggcacacgccatgcagggggataaagagcgctgtcttcagatgggtttcgacggctacattgccaaacccatcagccaggagcgtctcgctgaggagattgctcgcgtgctcccgcgccacgatgaccctgcagccttcccggatgaagcacgcctgctgaagcagtgtgctgacgaccatgctctggtccaggagctgctggccctgtttggcgaagggctggaggaggccatgaaggccatcaccctggctatcgacagcgacgatcgtgaagcgctgcgccgcgcggcccacaagctgcgaggagaagccgtcacgctggatttcgggcgactcgcccgtcagctgcaggcgctcgagagcgaggcgcacacgctggagggacaacagcttgcggcgctaaaccggcagctacaaaaggaatcgctgcgcctgatggcgtggctcaacgcgcgcggggtaaacgcatgatgactcgcaactgcgcgctgctcgttgccctgttgaccacccacacggtggcgaacgctgcgccggtcagctggtctctagccggagaatggcaggttcaggatgccaatgacaccgcgcatcctgccgcatcaggctggcgcccgcttcaggtccccgccaactggtacagcgccgggtacgatcaccagggcgcgctgtggtacaagcacgcgttttccctgcccgcgcagccgcccgacgtaatgagcaccctggtgtttgacggcgtcgattacctggccgaggtcaccctgaacggccagccgctgggccagcatgagggctattttcagcgcttttcgctggatgccagtcaagcgttacaacgtcacaaccgactcgtggtcagggtggacagcccttacgaagatcccaataaggtctggccgctgcataaaacggtcatgaaggggatccttaaccagcatgacacgcgtcccggcggggcctggtcgccgcaaggacaggacgccaactcgggcggcatctgggcgccggtgaggctgcatcttagccggggcgctacccttgatgagaccatcctgcggccagactggtcacaggggctgatgcaccccgcgctgaaagcagatattcgctatcgcgcgctcggtcagggcacggcgaccgtgcggctcaccgccacgcccgccaacttcagcggtaggcgctatcaggctgactttccggttaccctcgaaagcggcgcccattccgtgcagctgacgctgcccatgccgaaggcaaaactgtggtggcccgtcggtaccggaaaaccccacctgtataccattcgcgtggcattgcgggatgaaaacggcctgatggatacggcggtcacccgcaccggactgcgcaagatcgtcgagcagcccgacaataagggctggctcattaacgacaaacgccttttcattaagggcagtaattacatcggttccccctggctcagcaccatgacgcgagaaaaataccgtcgcgatcttcgtctggtggaagccatgaacgccaacgccatacgcgtgcacggacacgttgccggacgtgcgttgtatgacgtggccgatgagatgggcatgatgatctggcaggatgttccgctgcagtggggctacaacaacagtgcggctttcacggaaaatgcggttcgacagacgcgggagatgatcgaacagttcggtaattcccccgccatcatcgtctggggcgggcataacgaaccgccgtggaactcgccgtggatggaaaaacgcttcccggactggaataaagatctgaatcgcgagctcacgcaaaaggtggcggatacgcttgccgaagatacctcgcgcatcgtgcaccgcttttccgccgttgaggagcattactgggcgggctggtactttggtaccgtacgcgacctgcttgctccggccaaaacggggatcatcaccgagttcggcgcgcaggcgcttccccgcttatcgacgctaaaaaccatcatcccggcggcgtcgctctggcccaaaacgaccgccgctgacgatcccggctggaccgtctggaaataccataattttcagcccttccagacctttaagtttgccggtattccgcgtggggacaacattcaggcgatgatccgcaatactcaggcgtaccagtcgcagctggtggccacggcggcagagagctaccgtcgacagcgctaccagccggtgacggccctgttccacttcatgtttgtagaaacctggccctccatcaactggggcgtggtggactacctgcgtaagcctaaagccgggttttacgccttaaaacgcgcctaccagcctgttttgccgtccattgaacccgtcacggcgcagtggcaatccggggcggcggcgaccgtgcgtctatgggccatcaacgacacctggaaaccgtgccgcgaatgccgtctgagctggcgcatcacccagcgcgataaggtgctggcaaatggcacgacgacgatgacgatcgcagcagactcgggaacgatggtaaaagcggtcacggccacgcccgtgggccaggacgacgtgtcgattcggtttacgattgaaaacagcgcgggaaaaattgtcggcgaaaatcagcgcacggagtccgtcacaaagtgagcgaggggaaaaggaaaattgccgcttcccctgctttcttgtaccctttcagcgtttaccccaatcccctaaaaatcgagacttccggacgcctatgactgcacatatttccaaagatcctttgcatggcgtaacgctggagatgatggtcaacgccctggtggcgaaatatggctggagcgagttgggcgaccgcatcaaaattaactgtttcagaaaagaccccagcgttaaatcgagcctgaaatttctgcgccgcaccccgtgggcgcgcgcggaggttgaagccctgtatctggactctctcagcgatgagggaaatacagcgcaggcggcgcccgcctttaatccctgggccaacagcaggattatcaagagctaatacgcaaatgacgcgacacgtaaaacggattggtgcgctggctgcctgcgcgcttttacttgtaagctgctcctcaaaaccacccaaatcgctggttacccctcttcccaccgtcagtaaaccgacgccgcaggcaaacgccccgatgcgcggcatctggctggcgaccgtctcgcgtctcgactggccgccggtggcctcggtgaatggccgcagcgcggaccagcgcatcgcgatgcaaaagcaggcgctgatcgcaaagctcgacaaccttaagcagctcggcatcaacacggtatttttccaggtgaagccggacagcacggcgctctggtcatccaaaattttaccgtggtcagatatgctgaccggcaacatcggtgagtatccggggtacgatccgctgcagtttatgcttgatgaagcgcacaagcgcggcatgaaggtccatgcctggtttaacccctatcgcgtatcgaccaacaccaaaccgtccaccatcgccgccctgaaccggacgtcataccagacgccgtccagcgtttatgtccagcatccggaatgggtccgcatctcgggtgaccgctttgtgctcgacccgggcattccggaggtgcgcgactggataaccaaagtggtgaccgaagtggtggcgaactacccggtagacggcgtgcagtttgatgattacttctatgccgaatcgccgggatccgcgctcaatgacgcgcagagctggcggcagtacggccaggggtttgcctcaaaagccgactggcgaagacacaacacgcagcagctgattgtccaggtctcccgcgcgatcaagcagacaaaacccaacgtggagtttggcgtcagcccggcgggcgtgtggcgcaaccgctcctttgacccggcaggctccgacacccgcggcgccgcggcctatgatgaatcctacgccgatacgcgtcagtgggtgcagcagggcctgctggactacatcgcgccgcagatttactggcccttctcgcgggatgccgcgcgctacgacgtgctgaccagatggtgggccgatgtggtgaagccgacccacactcgcctgtatatcggcattgcgttctacaaggttggcgagccgtcgaaaaaagagccggactggacggttcagggcggcgtgccggagctgaaaaagcagctcgatctcaacgattcgctgcccaacgtcaacggcaccatcctgtttcgtgaagattacctgaaccagccgcagacccagcaggcggtaaactatctccgtggacgctggggtagctaagtcacgatcaggcagaaacgcccgtttctgcctgtttttttacggcttcggcccgaacatcgcctcgagctgctgcgcatccggcatccccaccacctgctgcagctcgttttccgcattcagatagtaaattgcgggcgtggcgttagcgccgaggctgtccatcagcgcctgatgtttctgtaggatcgcaaccgtttcgcgggaagcctcgccttcaggcttgggcagttttttgccgccggaaagctcgtattcgcgccaggccgaaaccggatctttcgcattcagaatggcggcggcgttgcgtccgctgttggggttgaggaacgccaccagcagcgtattgagctgcaccttaccggccttcacccacggctgcgcctcggaccagaactgcttgcagtacggacagaacggatcggcaaagacaaagaccttgcgcggggcgctatccgccccttccttcaggggatgcgccgcgttgaggtttttccacatctcgcgtcccatcggggcgtagatctctttctggaagtagccctcgctgaggttcttccctttgtcatcataaagataacctgagatcacgtgcttgccgtccggcgtgagaaagagcgtcacgcccatatcctgatactgccccagccaggctggcgccccgcctggcgcatccagcttcttgatgatgttgatctgctgctgctcgctgaactgcttcaccacatccggtatggcttcagccgcctgtaccagccctgacgtcgccagcgccgaaagtaacagtaattttttcatttccctctccggtttatcgggggcatttcgcccccttcaggttagcggtttttcagtgcttcactgaccatttcgtcgaattgttcgaacggcacccagccgggaagcagcccctcgccgataagcgtggcgggcgtgccctggatccccattttttccgccacaatgaggctgcgcctgatcgtcagaaaactctcctcgtccggcgtcgtcacgctcacgcccacccgcttttgcgcctcctgaatgctggcgtcatcgtggtacccctttttcgccatcagggtgtggttcagcttcataaactgctcaggatgcgcacgccagacggttaacgcgtctcgtgcggcagtcagcgaactttccgagcggaaaggtaaaaacttaaagaccaccgccacgtccggatgtttttcgacaatcttctccaggtacggatcgaattttttacagtacgggcagttgtagtcggtaaacaccaccagggtgagctttgggtttttcgcgccgatgcgcggggagttcggatcgttaaacaggaaatcagcgatcgtcttttgcgcacgctgctcctggtccggcgtcagcggctgcgcggcgaatacctgaagcggggccagcaggagcagaagcgtaataaggaattttttcatgacacagttagccttttgcgttgttcagggtggtgaccagggtgcgcttgtccagcagcggcgagaggatctcgccatcaggcaggccggggccatacaccgcgttaaacggaatggcgtagcggtttcgcttcgccagaaaatccgcgataaacgcggacggctggctccagtccccgcgcagggccaccacgtccggctggcgcagcgcggcaatcacgtccggctgactgagtacgcggtgctcgttaactttgcacgtcacgcaccagtctgcggagatatccacaaacacccgtttcccctgcgccagcgcgttctcgatagtctcttcactgagcggctgccacgggatagtctgcgcaacgttttgtgccggagcgtcaggcggcgcgttaagcagcccgcgcacctgatacccgccgaacgccgacagcgcgatgaccaccagccagaacagcggcgaagatttttgcccctttagcgcaaacagcaccagcgcgacggcagtcagccccagcatcacgatctggctgaccgcctcgcccagatgcacgctcaacagcgtcgccagccagaggctggaggccagcatcatcaggccaaggatgaccctgagcgtgttcatccagcggccgggtttgggcagcagcatggccgttttcggcaccagggcgacaaacagccacggcaggctcatgccaacaccgagcatcaggaagatcagccacagggcgtgcagcggcgcgccaagggcaaaggcgaccgccgtaccgaggaacggcgcggagcacggcgttgccagcagcgtggcgaacatcccttcgcagaagctgccgccgatccccgctccccctgccgtcgccagccgtccggcggcggcagaaggcagcagcatttcaaacgtcccaaacaggttcagcgcaaacaggaaggtcacggcaaccatcaggccgataaaccacgggttctggaactgaatgccccaccccagcgacgctccggccagcttcagcgcggtgaccatcccggccagcagcatgaaggaggtgaggatcccggcgctggtggccagaaagcgcagccggatggcacgcctgtccgagcccgcctgcaggatgctgttaagcttcatgcccattaccggcagcacgcagggcatcaggttgaggatcagcccgcctaatagcgcaaagagcaccatttttcccgtcccgtccggtgcggaggtctcttcgggcgttggcccaacggtcatggtggtttgctgcgcccgatcgccgttggtcagcacaaacgacagccttttgcctgccagcgaggcgggcttatcgccccattcgtcggtcacgggcaccgtcacccgaagcgcagtgccgtcgtgtttaatgaccggctcgccgggcagaatatcgccctccagcgggtcaaagtagatccccggattgtcccactttccgtccgtggtgccggtaataaccagcttgtcgccagagagccaggcggaaagatcagacgatacgcctgatgagcccggcacggcgcgcatcgcttgctcgaaggcgacctggaatccctcatccaccggctgggtaaaatcgaggtgcagcgggtagtccgtcagcagacacacgttgctgcacgtggagagcgtcagcgtcccgtcgagcgtgtcgcccttcaccccgtcgagaacgatcgggatagtgaccttatcgtgatagccctgcgtcgtcatgccggagatatcgaaacgcgacggtaccggccaggaccagctgtccgttacgccgtccggccagctgattttcggggccacgccgccctcgcccggcgatcgccagtaggttttccagccgggctttagctcaacggtgagcaggcccttaatgtgcgtttgctccctctccgcctgaaagcggatgcgggcgtgatcgttttgtggggagaccagccagccggtgtccgccgcatggacaatgccgatgcaggacagccacaggaagacgaatcccctgaagaggttaaccatgttgtactccgtgaacagtgaaaaattatcgtgtggtgacgatgtttttcattcacggaaaacgcagtttttaaggtgtattcggggaggtggtgcctgaacgggctgttccgccggagccagtgcccgcccttgcgtcaacagctgcagcagcgcgaagaagataataatggccggtaacgcaccgtcgaagaacagcggctgggcgcagagaagcgagtgagcgcctagctgacagggcgatggcccggactgctcggtgctggtttgcgttggggcatcagcactcagagaaatctgcggatccagtccctgtaaaaaatggttgagcatcaccgcacgctgcacgaggcaaagcgccatcgcgagacaggtgataatcaaaagccattttccgaggagctgacggttgcgcataagattccagagtgacaagacgccccgatcataaacgatagtgatgaatctacaagtgccggaagtgtaaggttttgtctgtcgccgctattcgcccgtcagcgcgtcatagacgtcccgcagccgcgtgcggagaaacagcaccgccttgtgcttgcgggataacagcgcctgttcgctggcgccggtctcctctgccagcattttaatgctgtagccgtggagctcggtcttttcaaacgcctcccgctgcggcggaggaagttcagacagcgcctggcccagctcttcccacagcagcgtcttgaggtactcctcctccggcgtgtgcggtacgccgaacagggtttcggccagctcgtcttccgggaaaccgtcgtcgtcttcgcccgtaaaatagccggagagcgacacctcgcgcttcttacgcgcccggtcggtcatttcgttacgcgccgcgcggaacagccaggcggcaacattttcgaccggctgctccactttcatcagctgatacgtcacttcctgcaaaatgtcgtcggcatcatcgcgcacggacgtccgtccgcgaatgaaggctttcagccgggcgcggcaggcattgagcgccgacatcagcatggaaccgcccgcctccccggctttcatttcgctcactctgcttccggcgtttttggcgtggtgtcgtcgcgtttatcgtcacgatgaccgtgccagccgcagtggccgcgaccgtggcgaccaaacccttcgcgacgctgctgaataaacgcctcgcgctgttctggcgtcatgttcatccagcgctcgtgcatccggcggtgcgcgccaaacattccggggcggaaacctaacccgccaaacagaatgcggctcagcaccagaatgcccagcgcctgccagaatccaatggccttaacgccaaggatggccgggagcaaggcgttccacagggacatcaccagcaggccgagcacgatgaaaatcaccgcgccgataactaagcccttgcccatgcggtggcgaccaaatccgcgcccgtgacctctgccgtgcagttcaaaatctctcatggtgtttacctcgtttacagtaactgattatggcttgtgatgaggtagacggatgagggagggaaatattgctggggtgaatggaaaattttgtatggcgaagtagaatcacgcaaacacagcgccacatgatagaacgggaaggtaaccataggaaactattcataagcttcaataccaaaccgctctacggtccgttgtgcctcgtcattagctctgaggttaaggtggatcatcgcagtctgctttgaagggaatattttggctttgccataaaaaactgggtaatgactccaacttactgatagtgtcttatgttcagataatgcccgatgactttgtcatgcagctccatccactgccgaaccatttatttacccgcgatacctcctgctggatctataacggcgtctctattaacccaatggccaaaccggcgcgtcagcgtgaaaccaataacctgcgggcaatatatcgctggcacccggcgttcgccgacggcgattttattaagtatttcggcgacgagaatattaattacgaccacgccactttagaaggcggcgacgtattagtcattggccgcggtgcggtattgatcggcatgtctgaacgcaccaccccgcagggcgtggagttcctcgccaacagcctgttcaaacaccgccaggccgagcgcgtgattgccgttgagctgcccaaacaccgctcctgcatgcacctcgacaccgtcatgacccacatcgacgtggataccttctccgtctacccggaagtggtgcgcaaagacgcccagtgctggacgctcaccccggacggacgcggcggcctgctgcgcacgcaggaaaccgacctgctgcacgccatcgagaaggcgctcggcattaaccagatacgtctgatcaccaccggcggcgacgcctttgaggccgaacgcgagcagtggaacgacgccaataacgtcctgaccatccgccccggcgtggtgattggctacgagcgcaacgtctggaccaacgagaaatacgacaaagcgggtatcaccgtgctgcctatcccgggcgacgaactcggacgcggccgcggcggcgcgcgctgcatgagctgcccgctggaacgcgacggaatttaaaggagccatcatggaacgaaaacccactctggttgtggccctgggcggcaacgcgctgctcaagcgcggcgagccgctggaagcggagatccagcgccagaacatcgagcaggccgcccgcaccatcgccggcttaacggcgcagtggcgcgtggtgctggtgcacggcaacggcccgcaggtcggactgctggcgctgcaaaacagcgcctacgacaaagtcacgccctacccgctggacgttcttggcgccgaaagccagggaatgatcggctacatgctccagcaggcgctgaaaaacagcctgccgcagcgggaggtgagcgttctgctcacccaggtagaagtggacgccgccgacccggccttcagcaacccgaccaaatacatcggcccggtctacagcgaagcccaggcgaaagcgctggccgcggagaaaggctgggtgttcaaggccgacggcagctacgtccgccgcgtggtgccgtcgccgcagccgaagcgcatcgtcgagagcgacgccatcaccgcgctgattcagcgcgaccacctggtgatctgcaacggcggcggcggcgtaccggtggtggaaaacgccaacggctatcgcgggattgaggcggtgatcgacaaagacctctccgctgccctgctggcgaggcagatcgaggccgacgccctgctgattttgaccgatgccgacgcggtgtacctcgactggggcaaaccgacccagcgtccgctggcgcaggtgacgccggagctgctcagaggcatgcagttcgacgccggatcgatggggccgaaggtggccgcctgccgcgagttcgttgaagcctgcaacgggatagccgggatcggcgcgctggccgacggcgcggagatcctcgcgggcgagaaaggcacgttgattcgtaactgaacactcattttaaaaaggatttacccatgaccatcaacctgaaaaaccgcaacttcctcaaactgctggactacaccccggcggagatccagtacctgatcgacctcgccatcgagctcaaggccgccaaaaaagccgggcgcgagaagcaaaccctggtcggaaaaaacatcgccctgatctttgaaaaaacctccacccgcacccgctgcgccttcgaagtgggcgcgttcgaccagggcgcgcaggtcacctacctcggcccaagcggctcgcagattggccataaagagtcgatgaaagacaccgcccgcgtgctgggccgcatgtatgacggcatcgaatatcgcggctacggccaggccatcgtcgaagagctgggcgagtacgcgggcgtgccggtatggaacggcctgaccgacgagttccacccaacgcaaattctcgccgatctgatgaccatgctggagcactccccgggcaaaaccctgccggagctgagctttgcctatctcggcgacgcgcgcaacaacatgggcaactccctgatggtcggtgcggccaagatggggatggatatccgcctcgttgcgccgaaatccttctggccggaggcagggctggttgagcagtgccgcgccattgcgaaagagacgggcgcgcgcatcaccctcaccgacgacgtggaagaaggcgtgcaggggaccgatttcctctacaccgacgtgtgggtctccatgggcgagccgaaggaagcctgggccgagcgcgtcagcctgatgaagccgtatcagattaacgcccaggtcatgaaggccaccggcaacccgaacgtcaagttcatgcactgcctgccggcgttccacaacgagcacaccaaagtgggccgcgagatcgagatggcgtacgggctgaaggggctggaggtgacggaagaggtcttcgaatcaccgaactccatcgtcttcgacgaagcagagaaccgcatgcacaccattaaagcggtcatggtggcgacactcggcgactaatcaccgcccggcgcgccgcggggtgcgccgggtttaaggagaacatcatgggcaagttcaagtttccctccgcttacaccattctcttttttctgattgccgtcgtggccgtgctgacgtggattgtcccggccgggcagtaccatatggcaatgaacgaggcgctcggcaaagacgtccccgttgcaggcacctacgcgcacgtcgcggcgcatccgcaggggctggtttcggtgctgatggcgccgattgccgggctgtacgatccggaatccggccaggccggggcgatcgacgtggcgctgtttattctgatcatcgggggattcctcgggatcgtcaccaaaaccggggcgattgacgccgggatcgagcgtgtgaccacccggctgcgcggacgcgaggagtggatgatcccgatcctgatggcgctgtttgccgcaggcggcacgatttacggtatggccgaagagtcactgcccttctataccttactggtgccggtgatgctggccgcgcggttcgatccggttgtcgccgcctctaccgtgctgctcggggcggggatcggcaccctcggctccaccattaacccgtttgccacggtgatcgccgccaacgccgccgggatccccttcaccaacggtatcgccctgcgcgtggcgctgctggtcatcggctggatcatctgcgtggcgtgggtgatgcgctacgcccgcaaggtgcgtaaggatccctcgcagtccatcgttgcagacaagcaggaggagaacctcgcccatttcctcggcaacaagggcgaacagtccctggaattcaccccggtgcgcaaaatcatcctggtgattttcgctctggccttcgcggtgatgatttacggcgtggcggtgctgggctggtggatggcggagatttcagcggtgtttctcgccagcgcgatcatcgtcggcctgattgcccgcatgagcgaagaggagctgacgtcgacgtttatcaacggcgcgcgagatttgctgggcgtcgcgctgattatcggcatcgcgcgcggtatcgtagtcatcatggataagggcatgattacccacaccattttgcacagcgcggaagggctggtcagcgggttgtccacggtagcgtttatcaacgtgatgtactggctggaagtcgtgctgtcgtttcttgtgccttcttcatccggcctggccgttctgacgatgccgatcatggcgccgcttgctgatttcgctaacgtcaaccgcgacctggtggttacggcttaccagtcggcctccggcatcgttaacctcgtcacgccgacctctgcggtggtcatgggcgggctggctatcgcccgggtgccttacgtgcgctacctgaaatgggtggcgccgctgctggcgatcctgacggtggtgattatggtggcgttaagtctgggggcgttgttgtaatttgccggatggcgctgcgcttatccggcctacggatcggtgcggtgtcaccggttatttcggaaactgatatgggaaacatgatggattacgaagagtactctcccaaagaacagctgcagctcacggtgtgccagcgtttgatcgccgaaaagagttacctttcgcaggaagagattcgccgcgacctgcaggagagagggtttgacagcatcagccagtcgaccgtttcgcgattgctgaagttgctcggagtcataaaaattcgaaatgccaaagggctaaagatttattcgttgaatcctcaactgcgccctgcccccgacgccgcgcgtaccgtttcggaaatggtggtcagcgttgagcataatagcgagtttatccttgtccataccgtcgccggatatggccgcgcggtggcgcgtattctggattatcaccagcttccggaaattttaggcgtggtggccggcagcagtattgtctgggtcgccccccgggtggtgaagcgcaccgcgctggtgcataagcaaattaattatttactcagaacgcattaatattcacaaagaaccgtttgcattgagtaaagcgtgcattaaatcgcttgatccgaaaagcgagctgcgtataatgcccgacaatttgccgggaggaagcatggtcaagcgtgtacgacataacgtcttaccgcgtctgaaatcagacgctggcctgccgtttttcttcccgttgctaaacctattcccagagcccctcatttgaggggcttttttttgcccggcgtcaggagataaacatgaatccgctttatcaaaaacacatcatttccataaacgacctcagccgcgaagagctggaactggttctggaaaccgcggcaaaactgaaggccaatccgcaaccggagctgctgaagcacaaggtgattgcgagctgcttctttgaagcctcgacccgcacccgcctctcctttgagacctccatgcaccgcctgggcgcgagcgtggtgggcttctctgacagcagcaacacgtcgctgggtaaaaaaggcgagaccctggcggataccatttcagtgatcagcacctacgtcgacgcgattgtgatgcgtcacccgcaggagggcgcggcgcgcctggcgaccgagttctccggcggcattccggtgctgaacgccggtgacggtgccaaccagcacccaacgcagacgctgctggatctgttcaccattcaggagacgcagggcaagcttgagaacctgaatatcgccatggttggcgacctgaagtatggccgcaccgtccactccctgacccaggcgctggcgaaatttaacggcaaccgcttctacttcatcgccccggaggcgctggcgatgccgcagtacattctcgacatgctggacgagaaaggcattgcgtggagtctgcatgccagcatcgaagaggtgatgagccacgtggatattctgtacatgacccgcgtgcagaaagagcgtctggatccgtccgaatacgccaacgtgaaggcgcagttcgtgctgcgcgccagcgacctggaaggcgcgcgcgacaacatgaaggtgctgcatccgctgccgcgcatcgatgagatcaccacagacgtggataaaacgccgcacgcctggtacttccagcaggccgggaacggcatcttcgctcgccaggcgttactggcactggttctgaatcgcgaattagctctgtaaggggagacgaccatgacacacgataacaaactccaggttgaagccatcaagcgtggcaccgtgattgaccatatccctgcgcaggtgggctttaagctgctgacgctgttcaaactgaccgaaactgaccagcgcatcaccatcggcctgaacctgccgtcgggcgagatgggccgcaaagacctgatcaaaatcgagaacaccttcctgaccgacgagcaggttaaccagctgtcgctgtacgcgccggacgccaccgtcaaccgcatcgacgagtacgaagtggtcggcaaatcacgcccgagcctgccagaacgtatcgaaagcgtgctggtctgcccgaacagcaactgcatcagtcatgctgaaccggtttcctccagtttcgcagtgaaaaagcgcgcgaatgacatcgcactcaaatgcaaatactgcgaaaaagagttttctcattatgtggtgctggccaactaattgaggttggtaatgaaatcccggctgttataatggccgggaacattcttaacgctgtaattctggagaaaacatgagcaaagtactcgcgacggaaaatgcaccagccgctatcggcccttacgttcagggcgttgatctgggcagcatgatcatcacttcaggtcagatccccgtaaacccaaaaaccggcgcggtgccggaagatgtcgcggcgcaggcgcgtcagtcgctggaaaacgtgcaggctatcgtggaatctgccggtctgaaagtgggtgatatcgtgaaaaccaccgtgttcgtgaaggatctgaacgatttcgcgaccgttaacgccacctacgaagcgttcttcaccgagcataacgccaccttcccggcgcgctcctgcgtggaagtggcgcgtctgccaaaagacgtgaaaattgaaatcgaagcgattgccgttcgtcgctaattcgctttggcgatgaaaaaaggcagcccaggctgccttttttgttgcttgctactgattccgcgtggcgcgcagcagcgtctccagcgggtacaccgccgcaatcaccacttcgtcctgcaccttcgccgcgttatccagctcgctctgaatcgaggcgatctctttgtcatccagcgtgccctgacgcgccaccaggtcggtgagccgcaggccaatcgacgccagcttatccacctcctggatcaccggcttcatcgccttcagctgatagctgttttcgcttaaggccagcgcgtcgctggtgttgctctgccagcggttaaagacgtggcgcagggcgtcggcgctttccgtgtcttccgcatcgctcaccagacggtccgcccatttgtgcatctggcgcacggtggtgctttcggcgttcagcgcatccgcaaagcggttgagcggctcgaactgatggtagtttccggcctggaacttcaggtgctggcgggtgtaatactgagccggttcaatcgcctgcgcgaggacctgcagcggcagggtgtcggcattaccggcgaggcgcgtgaactgcacctgctgctgggtatgctgctgcagcccgaccgacaccgtcgaccagctgtccatcgcctgcaggcgggtgtacatgttgtcgacgtcattgacgtcctgcgcggaccagagccgctccgccaccgcaaacgtacgcggccacagacgaatatccagcaccggcgccaccacgttttccgcccacagcgccgcttcgccgccgagcaggttggactggttcgccacgtccggcacgacgggcggaacgcctttcggcacatcgtccagacgcgtgccgctaatcgggtagcgcgtattcccgacgaggaaataaccggagagtttgtcgttatcaacggtgacaaccgggcgcgtttcgcccatccaggtatcgacggtgaaggtcacctgattgtcatcccgccattcaatatcctgcaccgcgcggcgggatttcccggcaaaatcaataaacccgcgccagccggcatcccctttcaccagcgtgaagctcccctccaccggcttgcccttcaggcgcggcatggagaaggcacagctctgggcgctgtcggtgtccgctatcacgtccacgccgtttaacccctgcgggacaatctcgttgcggtagtgataggcggtggactggggctggtcgagataaaagccggtcgacagaatgcccctgtagccattctgcgccacctgccccagcgcgtcctggccctgccaggactggatcagaatgcttttcggcagctcgggatggtagatctcatcccagccgaccatctggcggtgatgcttctcgaggatcgtttccagcctgcggttgaagtacgcctgcagcgcgtggctgtccgccagcctgttgtcgcgcataaactgctggatagccgggttcgctttccactggctgtcgtccacttcgtcgccgccgatgtgcagatacggatcggggaagatcgccgccagttcgctgaccatcgcgtcggcaaaagcgtaagttgcgtcttttgtgggatccagcaccggcttcagcacgccccagtggcgttccatggcgtacggtcccggcgcgctcattagctccgggtaggccacggcaatcgccgaggcgtggcccggcatgtcgatctccggcaccacgcgaatgccgcgctcggcggcgtaacgcaccacctcgcgcatctgctcaggcgtgtagaacagcccgtcgctggcaagctgggttaattttggataacgcttcgagctgaagcgccagccctggtcgtcggtcaaatgccagtgcagcacgttgagcttcgccgcggccatgccgtcgatctggcgtttaatatccggcagcgggagaaagtggcgtgccgaatcgagcagcagcccgcgccaccggaagcgcggtgaatcgtcaatggtcacccacgggatcgaggtgttttccgctccgttctgcaccagctggagcaaagtttccatggcgcgcaaggcaccgaagcgggtgttggcggagatgttcacgccgttggcgtccaccgtgagcttatagctttcatcgctgtccggcagcggctgcggcttcacctttttagcgatggcgatgcggatagttggtttgtctggcttttcagcctgaggctgcagcgtccagccggtttacagggcgatgcgctggcgcagtcggttgacggcgtcaccgagatcgtccccgctgacgcttacagagacgttgttgctaagcaccagtgcgccctgggtcgtcgggcgttcgaccttcgcaggccagggcattaaggggagatcccctgccggggcggcaaaggcagaggcgccgagcatcagcccggcggttaagagactgtaccgtaacatgaatgttccttatctgacgggccaaataaaggcaaaacattctgttaacatgcgctcattttgtcgtcaagcgaatgcgccgacggagatcacaggttgttgaatttgggaggaaagctattgccgggtggcggcttcgccttaccgggcctacgtttggatcgtaggcccggtaagcgcagcgccaccgggcttgccgttactgccacccataccgacgcgcatagaaccctttcaccatctgggtcagcaccatataacccgcgaggatcgccaccagccacgggaagtagctcagcggcagcgcctgcagctgcaggtagctcgccagcggtgagaacggcagcgcgatgccgagcgccatcacaatccccgtcatcataatcagcggccacgcggcgcggctctggatgaacggaatgcggcgggtgcggatcatatgcacaatcagcgtctgcgacagcagccccaccacgaaccagccggactggaacagcgtctggtgttccggtgtgttggcgtggaacacaaaccacatcaggcagaaggtcaggatgtcgaagatggagctgatcgggccaaagaacagcataaagcgcccaagatctgccgggttccagtgctgcggcttctggatctgctcgtcgtccacgttatcaaacgggatcgccacctgagacacgtcatacatcaggttctggatcagcaggtgcagcggcagcatcggcaggaacggcagaaacgcgctcgccaccagcacgctgaagacgttaccgaagttggagctggcggtcatcttgatgtacttgagcatattggcaaaggtacggcgcccttcgatcacgccctcctccagcaccatcaggctcttttccagcagaatgatatccgccgcttcgcgggcaatatccaccgccccgtctacggagataccgatatccgccgcacgcagggcgggcgcatcgttgatgccgtcgcccatgaagcccaccacgtgcccttctcgcttaagcagggtgacgatgcgctctttgtgcatcggcgtcaggcgggcaaacagcgtggtgcgctgggccagcttcgccagttcgtcatcagagagatgttcaatatcgctcccgaccaccacgtcacccgcgtccagccccacctcgtggcacactttcgccgccaccagctcgctgtcgccggtgaggattttcacggtaataccgctcgccttcagcgctttgagcgccggtgcggtggtctcttttggcggatcgaggaaggcgatgtaaccctcgaggatcagatcggattcgtcgatacgctgatagtccccctcgcgcgccggcaggaacttgctcgccaccgccaccacgcgcagcccctgacggttcaggttgtcggtgacgcgcttgatgcggcgcagcatggtgtcgtccagcggcacgatgtcgccgttatagcgtacctgcgtcgacacgttgaggatctcctgcagcgcgcctttgcagatcaactgatgcacgttcggctgctcgctcaccaccaccgacatacggcggcgctcgaagtcgaacgggatctcatccaccttctgccagcggccggagagcgtgcgggctgactcttcatctaccccttccagcaccgcgacgtcgagcaggtttttcagcccggtctggtaatggctgttcagccacgcgctgtgcagcacgcgctcgctggttttgccggagatatcggtgtggttctccagcacgattttgtcctgcgtcagggtgccggttttatcggtgcagagaatgtccatcgcgccaaagttctgaatggcgtcgaggtgtttgacgatcaccttctgtttagagagcttcaccgccccgcgcgccagcgtagaggtgacaatcatcggcagcatttccggcgttaagccgaccgccacggagagcgcgaacagcgccgcctcccaccagtcgcctttggtgtagccgttgatcagcagcacgattggcgtcatcaccatcataaagcggatcagcagcatgctgacgcggccaatccctttctggaaggcattcggctcgctctcctgctcgctgacgcgcccggcaagctgaccaaaccaggtgttgcccccggtggcggtgacaatcgcctgcgcggtgccgctgacgaccgtggtccccataaagcacagggtgtcgcactcgagcgggttcatctgctgcgggtcgcggctgcgcgccaccttttcaacgggcagggattcgccggtcagggaagcctgcgccacaaacagatcgcgcgcctgaatgatgcgtaaatccgccgggatcatgtcccccgcggccagcttcaccagatcgcccggcaccagctggtcgataggcaattccacccaggcgttttcgccgagatcgttgatcacgcgcgagacggtcgcggtgttgctgaccatcgccttcagggcgtccgccgctttggtggagcgggcctcctgaataaagttcagcagcgtggagatgcccaccatcagggcaatcacccctgcggcaaacagatcttccgtcgcgtaggagatgaggccgagcacggtcagcagcaggttgaacgggttgcggtagcagagccacagatgcacccaccacggagacggcttttgcgccggaatgaggttatcgccatgcacggcgcggattttttccacttctgccgcgttcagcccttccgggtgtccgccaaaggcgcgccagacttcgttttcatccatcgccgccacgttcaggcagcgttcggtcagggacgcggggatcgccgcccccgccatgtttttggcgtttggcagcgggtcgcgctgaacaagacggtgtggcaggtggcggctcagcagggcctgcagctgccgggtgatatttttaaacatcgtcattcctccgcatccgcaaaggcggacgcagcatttccttcaggcgtggcaaagccgtacctgagaggcactcaatttttcaagcaggaacgtttggaacgctgctgcctcacatcaccggtgagtcagcaacaggctggcttaccggaaagaacgcattctcccgttcaggagaggtgtgggatcgggatccatgaagcctccggtaagtaaaaagtagggtgtcgccgcgcagtataaggatttaagcgtaccctttttgatgattcgggcggtattatacccccctgcaaataaaccgaacgtaaaccagatttagcccatagcgaaatcgcgctatagcattaggctcaattcattacattgtcgttgttacagggaatacagcatgcagaaccgccttacgattaaagacatcgcgcgtttaagcggcgtggggaaatcgaccgtctcacgcgtgctgaacaacgaaagcggcgtcagcgaacgcacccgcgagcgcgttgaggcggtcatgaatcagcacggcttttccccttcccgctccgcgcgcgccatgcgcgggcaaagtgacaaagtggtcgccatcattgtctcgcgtctggattctctgtctgaaaacctcgccgtgcagaccatgctgcccgccttctacgaacagggatatgacccgatcatgatggagagccagttctcgccgcagctggtggaagaacatctgggcatgcttcagcggcgcaatattgacggcgtggtgctgttcggttttaccggcatcaaagacgagatgctgaaaccctggcagccgtcgctggtgctgctggcgcgcgatgcccacggttttgcctccgtctgctatgacgacgagggcgcgattatcaccctgatgcagcgcctgtttgacgaaggccatcgccacatcagcttcctcggcgtaccgcacgcggacgttaccaccggcaagcggcgccatgaggcctatctggcgttttgcaaaaagcacaacctctccgccgtggcctccctgccggggctgggcatgaagcagggctacgagcaggtcgccagcgtcctgacgccgcagaccaccgcgctggtgtgcgccacggatacgctggcgctgggcgcgagtaaatatctgcaggagcagcgtatcgacggtctgcaggtggcgagcgtcggcagcacgccgctgatgaagtttttgcacccggagatcatcaccgtcgatccgggctacgctgagtccggcagacaggccgccgcgcagctgatcgagcagatcaacgggcgcgcagagccgcgtcagatcgttattcctgcccacctttcataacccccaccaatcggtttattgtgatcttcgcccgatttcgggaacgttcccattttcgccgtcacgctgaaggagtaggcttgcgctcaggtcattacaccccctcaccatctgtcatgaggtttcatgatgagtaaagtcaaacaagcagatattgatcagctgatcgtcctggtcggcggccgcgaaaacatcgcaaccgttagccattgcattacccgcctgcgcttcgtgctgaacgatccggccaaagcgaacccgaaggcgattgaagagctttccatggtaaaaggctgcttcaccaacgccggtcagttccaggtggtgattggtaccgaagtgggcgattactatcaggctctgctggcgaccaccgggcacagcgcggcggataaagagcaggccaagaaggctgcgcgccagaatatgaagtggcacgagcagctgatttcccacttcgcggagatcttcttcccgctgctgccggcgctgatcagcggaggcctgattttaggcttccgtaacgtcatcggcgacgtgccgatgagcgacggcaagaccctggcgcagatgtacccggcgctgaaaaccgtgtacgacttcctgtggctgattggcgaagcgatcttcttctatctgccggtcgggatttgctggtccgcggtgcgcaagatgggcggtacgccgatcctcggtattgtactcggcgtcacgttggtctctccgcagttaatgaacgcttacttacttggtcaacaggtgccggaggtttggaactttggcctgtttaccatcgccaaagtgggctatcaggcgcaggtcattccggccctgctggcgggcctggcgctgggctttattgaaacccgactgaaacgcatcgtgccggattacctttatctggtggtggtgccggtgtgctcgctgattctggcggtcttcctggcgcatgcctttatcggtccgtttggccgcatgattggcgacggcgtggccttcgcggtgcgtcacctgatgaccggcagcttcgccccgattggcgccgcgctgtttggcttcctgtacgccccgctggtgatcaccggcgtgcaccagaccacgctggccattgatatgcagatgatccagagcctcggcggcacgccggtctggccgattatcgccctgtctaacattgcccaggcctcggcggtgaccggcatcattatcgtcagccgcaagcacaacgaacgcgagatctccgttccggcggccatctccgcctacctcggcgtcaccgaaccggcaatgtacggtatcaacctgaaataccgcttcccaatgctctgcgcgatgatcggttccggtctggcaggcctggtgtgtggactgaacggcgtgatggcgaacgggattggcgtcggcggcctgccgggcatcctctccatccagcccgcttactggcaggtgtttgccctggcaatggccatcgccattatcgtccctatggcgctcaccaccgtggtttaccagcgtaagttccgtcagggctcgctgcagattgtttaacttcatctttcggggcgcagttgcgccccttcgcatttgcaggaacgcattatgaatacccttcctcactggtggcagaacggcgtcatctaccagatttacccaaagagtttccaggacaccaccggcagcggcaccggcgatttacgcggcgtgacgcagcgtctggactatctgaaaaccctcggcattgacgccatctggctgacgccgttttatatctctccgcaggtggacaacggctacgacgtggcgaactacaccgccatcgatccgtcctacggcacgctagatgatttcgacgagctggtcgctgaggcgcaccagcgcggcattcgcatcgtgctggatatggtgtttaaccacacctcaacccagcacgcctggttccgcgagtcgctgaacaaagcgagcccgtaccgccagttctacatctggcgagacggcacgccggagcagcttcccaacaactggcgctccaagtttggcggcaacgcctggcgctggcacgcggagagcgagcagtattacctgcaccttttcgccccggagcaggcggatctcaactgggaaaacccggcggtgcgcgccgagctgaaaaaggtgtgcgagttctgggccgatcgcggcgtggacggcctgcgtctggacgtcattaacctgatttcaaaagatcaggatttccctgacgacaacatcggcgacggtcgccgcttctataccgacgggccgcgcatccacgaatatctccaggagatgagccgcgacgtctttacgccgcgcaacctgatgacggtgggcgagatgtcctcgacctcgctggagaactgccagcagtatgcgtctctcgatggccgcgagctgtcgatgacctttaacttccatcatctgaaggtggactaccccggcggcgaaaagtggacgctggcgaagccggacttcgtggcgctaaaaaccctcttccgccactggcagcaggggatgcacaacaaagcctggaatgcactgttctggtgtaaccacgaccagccgcgcatcgtgtcgcgcttcggtgacgaaggagaataccggattcacgccgcgaaaatgctcggcatggtgctgcacgggatgcagggcacgccgtatatctatcagggtgaagagcttggcatgaccaacccgcacttcagccgcatcaccgattaccgcgacgtggaaagtctgaacatgttcgccgaattgcgcgccagcggccgcgagccggatgaattactggcgattctggcgagcaagtcccgcgacaacggtcgaaccccaatgcagtgggacgcgtcgcacaatgcgggctttaccgagggcgagccgtggattggcgtctgcgataactacgaaaccgtgaacgcccgcgcggcgctggacgatgcggattcggtgttctacacctatcagtcgctgattcgcctgcgcaaaaccctcccggtgctgacgtggggagattatgaggatctcctgccggaacacccttccctgtggtgctatcgccgccagtggcaggggcagacgctgatggtggtggcgaacctgagccgggaacgccagcagtggcagccggacccggtacagggcgcctggcgggtcgctctcggcaactatgatgacgttccctcccgccccaatgcgcggctattgcgcccgtttgaagccatctggtgggtgcaggaataaataccaggagatacagcatgctgtatctccttttttaggtttagcgatacgctaaatgtacgacgataacttttacatcacgctgtgcccaaaataaaaatagccctgccaattaaataacctcggcaggatatgatgaaaaagacaattattaaagcaacgtgtattagcgcattattattaagcacgcagggatggtgcggaaatacatccgtcgaccttcgatttggtcataatacgcgctcagacgtaaatgattcacgtattaaggtcatgcatcaggcaaataacggtttttacttctccgttgaagccgcacaaaaccacaacgataccttttttggtgataccgaccgatataatcccgatgacaaagggttaacggaagcagcacaggagattgaaacgcgctggcgcttcgatctgggtaatggcttcgccgttgcgcctggcatggtgacggttttcaccgccagcaatacccattaccgcccttttattcagggctggaaagcgttcgataacggtctgaacctctccgcccgttaccgttataacaccgtcaatgacgcacacagcgacaaagaagtagacggcagcggctacacccgccgccagtcacaccagttcgacatttggttcgcgtataacattggcaaattcggtatgtcctacaacccgcgcttccgctggcaggatgatgtcgatcagggaaccggggatgacacctactgggagcataccgttgcgttcaactacaagctcgacgatggctggacgccttacgtcgagctggtttcactggataaaacctacatcactgccgatggcagtcatgaaaatgattatgccgtacgtctggggatagtgaagcaactctgacggtctgactacaccgtatcgtgctgcagcagcctgcagccgatacggtccacggcgcttaatagttcaagctgcccttcccgctgatacagcgataccgcgttaatgtcgatcggtaacggccagcatagcgatgagatcgccgccagtgtcgatccctcgcgggtaatcgcaataatctttaaccctttgcgcaacgcgttacgcgccatttcaatcagcgactgcgtctccccggatttactgatcagcaccagcgtccccttcgatacccgtgtcagctggtgcatatcattcaaaataaggtgcggcaggctcgccagcgataaaaagcgcgacaggtaattgaggctggtgagcgaggctccccgtgcgtacagatagatatggctggaatgggtaagcaacccggacacctccgccacaatatcgtccgcctgcggccctacgtcaggctctacgggtgcgggtgtaaaatgatcgcgcaaaaaacgataccgaagctcggtataacttttatagcccatttttttacacacacgattaacggaagttgtcgtcgtaaaggtatcacgggcaatctgttttgccgatatattagaaatattacatgcgtgatgctgaatgtattcaaatatcaaacgttcacttccctggaatgaattcataaattacgccctgtttaatcccggcatgatattaacacaacgggaaaatagtctctggaagacgcttcacacattgcatttacgcgtatcacgatacgtaattagtattagcaaacattaaaaaccggtttaggttctctttatactttccctgttttcacatccagggaattatgacaatgacgaaacaaaaagttgtcgcggtaacagcctgcccgacgggcattgcgcacacctttatggcggcgaataaaattattgcatgggctaaagcgcacaatattgaggttaaggtcgaaacgcagggcagcgacggcgttaaaaaccgcttaacgaagcaggacatcgcctccgccacggccattattctggcaaccgacgtccccattcaggatgccgagcgctttgaaaacattcctcaccttcagacccgtacgcaagagctgatcaagcataccgatcgctatctgcgtcaggcgctggccatggaaaaaagcatcaccactgtcgtacatgaagacgatcttcagcgttcggcttaccagatttttatcggccatatcatggcagccatcagctatatgctgccggtggtggtcatgggcgggctgatgatggcgacggctaaaattaccggccagtttattaacatcgaacattcgccgttcagcgtgctggataaagtgggctttatgaccatcaagttcatgtatccggttttcgctatgtatctggcattttccattgccggcaaaccggcgctgatccccgggcttatcggcggcatcatgtcagacgaggtctacaagcgcttcttcgatatcgacggctttatgccgtccggcttctttggcgcgattggcatcggcttctttgtaggctatctggtgcgctggctgaatgattccattcacgtccgccagcagctcaccaccattaagaccatgctgatcgtcccgctgctcaccggcattacgctggtgatggtcatggaatacctgatcaacccgatttttggctcgcttaaccagctgatggtggtcttttttacctcggcaggtgacaccgggcgcggattctattccgcgatgatcgccgcgggcaccgcgttcgacctgggcggtccggtcaacaaggcggcaggctcggtcgcgctcggcctgaatggcatgagcgaaacgtttgatctcaccgcccgcgaactctccatcgtgatcccctctattggcgtcggctttgcggcgtttctcaacggccgctttggactaccggatgtcttcagccgggaagagaaaaccgtcgggagtacctcgttgctgctgggcgtgattgggatctccgaaggcgcgatcccgttcatcctgaaaaacccacgtctgatcccggtgttcatgaccggtgccgttgccggcgcgctaatcgccattgcacttggcgtgaagcagacgctgcctctgcctgccatctggggctggccgctggcaaccaatgtggtgggctacctggcgagcgtctttattggcgcactgatttgcgccctgggcgtgctctatgtcagcccaaagaacgccaggtaaggggaacgtcatgaatcagatccacgtcattgcccatacgcactgggatcaggagtggtatttcacccgtcaggacagcatggtgctggcatcctataactttgcggatgtcatcgacacgctggagctggagcccgcttacagctgctatcaccttgacggacagatggcggtagtggaggactttctcgccatcaatcccgattatcgcgccaggctggaaaccctcgtcaaagagaaaagaatctttgtggggccatggtatacccagacggacacctacaacgtgcatggcgaatccattattcgcaatctcaagtatggcattttcgccgcccgcgcgctggggcatgctatgcaggtcgggtaccttccggacacctttggccacaatgctcagatgcccaccattttgcagggctgcaatatcgacaatatcgtcttctggcgcggcatcgatcacgacagacaagcgaaaagcagccagttcctctggcgcgcgccgtctggggcgaccgttatcgcctgcgcgatggcattcggttatggcgcagctaaaaacatgcgttcagacgcgagccatctgcagggaaaaatcttcccgatggtcaatctcctgcgttcacgggccgggataaacgacctgctcctcccctgcggcggcgatcaggtctgcatcgacccggcgctgccggaaattctgcaggtcgccagcgcacgctctcccgatggggatcgatacgttatcagttcgctggagcgctacgtcgacattctgcgcgcgcagcgtgaacagtttgaaggctgggaaggggagctgaaatcgccgcgctacacccgcatccataaaacgatcggctccgtgcgctacgacataaaaaagaaaaatgatgaggtggagcagttcatcctgcggcagctggagccgacaatcgctatggctcgccatcaggggattgcggtcaacctctctgtggtcgatacgctctggaagaagctgttgcgaagccatgcccacgactctatcggcggctgtaatagcgataccaccaaccgcgacatactgcatcggctggagcaaaccgaacagctgtgccacagcctgtggaacctggtggtaaaaaccctggccgccgcctgcgctcaggaaaatgacctgctgattttcaacccgctgggcaccccaacgcagcgcgtagtgataaccaccctgtatagccgtgctgataatatcgccctgacatatcaggggcagcccatctctttcgacgtcctgaaaagagacattctgcccggcggaacggcgatctcccttagcgctgaaggcgaatgtgaaacgccccttcctccctattatcgctggcacgttgctgtgaaggcaccggttctgccgccggtcggctatctcagcgttaacgttaacgatgacccggcgcctttccagcagcaggaacagacaaagggcagcgagatagagaatgcgcattatcgattaacactggacgccggaacgctcaccctgcacgacaaacgcagcagcagatgcattccctctttctttactctcgaagactgcgcggatgcgggcgacagctacgatttctcaccgcttgcgggcgacacgccgacgcggagcgaccagttcacgctcgtcgactgcctgaaaacgccgcttgtcgaaaagctgatcgtggaagccaccctgcatcttccgccggatctcgcagaccgtcaggaaaatgcccgaacgccgttatcccttcgtctggcgtgtgaattacgcgatcacgatccgaacctgtatgtggacagctcgctggaaaacagccactgcgatcaccggctacgtttgctgattaacagcgatattcacacccgccacgcaatcgcctcgcagcccttcgcgataatcgagcgcgaaacggggtgtcacgctgaagagtggcaggaacactatcgcgaaatgcccgtggatatcgaaaccagcgagggaatcattgcagttgcggaagcgggcaaagcgctggtggtgaatagccgcggcatgaaggagtttcagataatcggcgacgcaccggctgcgattgccctgacgctgtttaaatcaacgggcgtgctgggacgcagcgatctcgactggcgaccgggccgggcatccggcatcaataatacggtggtcgagacccccgatgcccagttgctgaaaccgttgcgcttctccttcaccgtcgcgctggccgatagcgccgatcatctcacgcttcgccagctggaaaatcagacagcgggacagcccttcacctatcaacggcaaacgctgcacacgctcgatcaccgtcttgagcgcttttcgttgcgtctgcccgaccgcaggcttccggcagaattctcattattgtacctgccggagccgctcatcctctctgccttgccccatgcgcagcagtcgcagggtacggtcgttcgcgtgtttaacgccggcacggagcccgttcccgtcccggcaagcctggaggggtttcgtcagatcaactatctggaagagccggtgcagccggtaacggctattccccctttcgcgacctgcgattttttaatggaggcttaatatgaacctgcttgcattgacgcatcccgatctggtttttatcaacccgccgcaccgttcgcctgaagcgctaatacgctggctcgccgaaccgctcgccaggcaaaaaatcatcagtgatgaagaaacgttcatccagagcgtgttacaacgcgaaagtgaaggtcctaccgcgctgggtgaagcgctcgccgtcccgcacggtaaaaccgaggcggtgcagcaggcggcgttttgtctggcgctctttgacgacccgatacgctggcccgggctggatggtgacgaagaggtgagaatggttttcctgctcgccattccgcccgcggaagcagggagtacccatatgcagctgctgacgacgctgacctgtttattgacggaagatcgggtgcgtgagcgactgctggcggcgcacacccgggaagaggcgatgtccgcgctgagtgctgaagaaccacaaaaacaggacgatgctcctgaacgctcctttctcatcccggtggtgctgggcagtatcgcaaccgcagcctttttgcaggcgggactgagctgggtctgcggggggagttaaatgaacagcgcttagcacacaccgtgctgagcgcttgtttttgttgaataattaatcagatttttctcgcccggctttacaatcgctgaagcgcccgtcgtttgtactctcgtctttttactttgttctgcatcaaataaatcgcaaacatgtttgatgcaaatcactatatgtagcacttaaaatgcacgccgacccaacatcttgtatttatcgtctactattccaacaacaagacggcgcttacgctggccggaattgtggataacacgagctgggaacgcgggaagtctttggcctggcgggaaatgcgtccggtgaatacttctccacctctgtggataacctgtttttaaaaatggagtgatcatgacaccgcatgtgatgaaacgtgatggctgtaaagtgccgtttaaatcagagcgcatccaggaagccattctgcgtgcagctaaagcagcgggagtcgatgacgcagattactgcgccaccgtcgcagaagtcgttagcagccagatgactgaacgcagccaggtcgatatcaacgagatccagaccgcggttgagaaccagctcatggcaggaccttacaagcagctggcgcgcgcctacattgagtaccgccacgatcgagacgtccagcgcgagaagcgcggccgcctgaaccaggagatccgtggcctggtggagcagaccaactctgcgctgctcaatgaaaacgccaacaaagacagtaaagtgatccccacccagcgcgacctgctggccggtatcgttgccaaacactatgcccgccagcatctgctgccgcgcgacgtggtctcggcgcacgagcgcggcgagatccactaccacgatctcgactattcgccattcttcccgatgttcaactgcatgctgatcgatctgaaaggcatgctgacccacggctttaaaatgggtaacgcggagattgaaccgcctaagtcgatctccacggctaccgcggtcacggcgcagattattgcccaggtcgccagccatatttacggcggcaccaccattaaccgcattgacgaagtgctggccccgttcgtgacggcgagcttcaataagcaccgtaaaaccgccgaagagtggcagattccggacgcggacggctatgcgcattcccgtaccgagaaagagtgctacgacgccttccagtcgctggaatatgaggtgaacacgctgcacaccgccaacggccagacgccgtttgtaaccttcggttttggcctgggcaccagctgggaatcgcgcctgatccagcagtccattctgcgcaaccgtatttctggccttggtaaaaaccgcaaaaccgccgtcttcccgaaactggtgttcgcgattcgcgacggcctgaaccacaagtttggtgacccgaactacgacatcaaacagctggcgctggagtgcgcgagcaagcgcatgtacccggacatcctgaactacgatcaggtcgtcaaagtcaccggttcgtttaaaacgccaatgggctgccgtagcttcctcggcgtgtacgaggatgaaaacggcgagcagatccacgacgggcgtaacaacctgggcgtgatcagcctcaacctgccgcgcatcgcgctggaggcaaaaggtaatgaagctgaattctggaaactgctggatgagcgcctgcagctggcgcgtaaggcgctgatgacccgcattgcgcgcctcgaaggggtcaaagcccgcgtggcgccgatcctctatatggaaggggcctgcggcgtgcgcctgaaggcggacgatgacgtatccgagatcttcaaaaacggccgcgcgtcgatttcgctgggctacatcggcatccacgagaccatcaacgccctgtttggcgacacgcacatgtacgacagcgaagccctgcgtgagaaaggcatcgccatcgttcagcgcctgcgcgacgcggtagaccagtggaaagaggaaaccggctacggtttcagcctgtacagcaccccaagcgagaacctgtgcgaccgcttctgccgtctggacaccgccgaattcgggattgtggaaggcgtgaccgataaagggtactacaccaacagcttccacctcgacgtcgagaaaaaggtgaacccgtacgacaagatcgacttcgaagcggcctatccgccgatcgccagcggcggcttcatctgctacggcgagtacccgaacattcagcacaacctgaaggcgctggaggacgtgtgggactatagctatcagcacgtgccgtattacgggaccaacacgccaattgatgagtgttacgagtgcggcttcaccggtgagtttgaatgtaccagtaaaggcttcacctgcccgaaatgcggcaaccacgatgcggctcgcgtctccgtgacccgtcgcgtatgcggctatctcggcagcccggacgcccgtccgtttaacgccggcaagcaggaagaggtgaagcgccgcgtgaagcatctgggaaatgggcagatcggttaatccgctgccacgttaatgcccggtggcgctgcgcttaccgggcctacggaccgctctcttttgtaggccgggtaaacgcagcgccacccggcgtggttattcacaatgaactatcaccagtactaccctgtcgacatcgtcaacggccccggcacccgctgcaccctgtttgtttcaggctgcgtccacgaatgccccggctgctacaacaaaagcacctggcgactcaattccggcatgccgttcaccgcggagatggaagataaaatcatcaacgacctgaacgacacgcgcatcaaacgccaggggatctcgctctccggcggcgatcccctgcacccgcaaaacgtgccggatatgttgaagctggtggagcgcattcgcgcagaatgtccgggaaaagatatctgggtctggacgggctacaagctggatgaactgaatgcgcagcagatggaagtcgtggatctgattaacgtgctggtcgacggcaagttcatgcaggatttaaaagacccggcgctcatctggcgcggcagcagcaaccaggttgtgcatcatttgcggtgagcgttagagccgtttgtttgcgtcatgataaacggctgatttttctctttttctgtatcactcattataacgccctcaggcaaactcaaactcataagtcatccagactaacctttattcccttttgcggattagccagtcgctcccggactgtctgtatcagcgcatcttcgctgtcgctgatggtgaccgttttcaccggcatgcgccccgtttcagcaacgtactgaaacagcaatcgcaccgcttccgttggggtaatattgagtttttccagcacggcataagcctcgtttttgagtttgtcatccagacggacgtttagcgtggccattatgcctccagaaaaatcgaatgtgtaatgcagtttagcattacattcgcattacatcgaattctggataacgcctctcaaaaacgactcaaactctccatcgccaccgccttaaacccggcgaaatcctcgcagctacagagccgtgacatcgcccgctcgcgcaggaaagtgacgaaaatatcgtaaatcgccatcgcctcttcgtactcgcttttgctgatggcgagcaggaagataacgtgcgcggtttcgtcgccccactgcacgccgtgcggggcgagtacggtgtagaccaccgttttctgcgccagcaggccgagggagtgcggcagcgcgatgccgtcgccgagcatggtgctgacgatagcttcacgctcaacaaccgaatccagaaactccgcgccgacaaagccctctgcttcaagctgttcacacagctcgcggaagagcgtctgctgatcgatcggcttgtcgataatgcggaaatgggccgcgtcgaagtatttatccagcatccacggacgggtgcggtccaccagcaccagtttgccaatctgctctaactggtaatcggtcgggaacggggcgatcatcaccaccggttttgacttttcgctgacgcgggcggtcgcgatcacaaagtcttcgctaatggtttccgccagctcgtactcgcgcagggtgagcgtgcgcgtcacctcaatctgcgggtatttacgctgcagtaccgcctcaatcatgcggaccatggcgttaccggcgtcgcataccagcagcacgcgcggctgacgctggtagccgatgttgtagtggcgctcaagcccgacgccaatatgcagcaccaggaagccaatctcgttttcgctgatcacatacggcgtgtatttgccccagctcgacaccgcggccagcgtcatgtcccacgccatcgggtagtgctgcttgatgttatccagcagcggattggggatcatgatttgataccgcacgcgggtaatcatggttttgatgtgcgtgagcaggtccgcgtgcagctgcgcgtcgctgagcaggttgtagttatagtgagtgttgatatagcgcaggatgtagttgaccagcgcctcgtcgtcgtcagcgttaatggcgctgggcgcgatctcctgaatctgccgcgccgcaatgtgcacgcacagccagctctcctccgacggcgaaagcgccttgcccgccagctgctggagggtcaccgcgatatctttcgccgcctcgcgcacgttctcttccacgtcttcggcatggaattccggcagcgggtaaccttcgctgatgcgacgtaccgacaccgcgcagtacaggcgcaggaacagctcgccttcatcggtcaggcgaatgtggtgacgggtcaaggcgtcgtgcagcaccggcaccatctgctccgccacgcccgcattcagcgccacgtcggtcaccagcgggttcaggctgtcctgctgcgccagctcccagagcagatcggtcaggcaggcgcgggtcgacatctcgctgccaaacagcttcatgccgtggcgcggacgggtttccagcgtcaggttgtagcgatgaaaccactcgcgcacctccgccatatcgctttgaagcgtggcgcggctgacgaaccattcgtccgccagatcctccagcttaagcgaaaacgccgaggtcagaaaacgcaccaccagataatgcacgcgctccggcccggtccgcgggatacgcagcgcgcgcgggtgggatgcctgaagctgctgatagcgctcggcatcctcaattttgagctggtagccgttgccccggctcaggatgaactgcgcgccgtggctggccagcagcgcgttcagggcggtgatgtccgcacggacggttcgcgtggagaccgacagccgctgcgccagctcgtcctgcggcagcgtctcgttttgcaacaggtcgaaaagttgcgccaaacgttggttcggaaatcgcacgtcgttgtcctcttacggcttaaggtgaaatgaccatctgggatgggctgccgaccggggtatagtctggctcaaagctcaatttcccgtcctgcgccacgcggaagcgggtaatgttgtcgctgcgctggttcatgacgtacagccagcgcccctgcttatcgagcgtcagggtgcgcgggtagtcaccgcgcgtccacacatcgtcctgatgcgtcagcgtgccctccgccgttacggtaaagtgcccgatgctgttatgcaaacggttagccacatacagctgcttaccgtcggcgcttaatgcgagcccggcagcaaagctggtgcctttgtaaccttccggcagggcagaaaccgttttaccctctttcagggtgccgttggtattcacggtataccgggtgagcgtagacgcctcttcgttaatcagccacagggcatcgcccttcggcgtaaagacaaagtggcgcggcccggcgcctttcgaggaggcgctgataaacggcggatcgttcggcgtcagctttcctgtccgatcgtcaaaacggtactgatagatgcgatccagccccagatcggtggaaaacacgtatttcccgctcggatcggcggcgatcatatgcgcatgggggccgttatgatcgctgatcgcgaaactgccctcgacggcagcttccggcttcgccgcgcccggttcgccttgatcctgatgtgtgtccgtggcgtcacccaggctgccgtctgcgttaacgggcagcaccgcgatagatccgctgacgtagttcgccaccagaagatggcgaccgttcggcgtcagcgacaggtaaaccggccccgcaccgccggaggccacctgactgagctcgctcagctcaccgttatcgccgacgcgcagcgcctgcaccacgccctgctccacttcgcttgccagatacagcgttttgccgtcctgtgaaagggtcaactgcgccgcattcggcagtttgcttacccgtgttttatcgttcagcgcgccggtttgcgggttaacagtaaaacggtacagcccttcaccgtttggattataggtacccacccaggcgtattgcgtctgggcgacagcggcggtggcgaacattgagagtgaagcgacaagcaaggtacgggtgtgcatggtggctcctgtataggtgtgagttctacttcaccagcttcttcgtcatctccagcagggtacgcacatcttccggacgcgtatcaccgctggctttgtcgataatcgagctgtagatatgcgggatgattttgctcacgcccgcgtcgagggcgatctgcaggatctcctcatagttttccagatcgatacctccggtcggctccagccagaagtcgtgacgggcgcaggcttccgctaccgctttgtactcgtcacggcacttcaggccgcccatcgggaagtatttgatagagctgccgccgaaatctttcagcagagcaatcgccgtttccaccggcacgatgccgtccggtgccgcgctgctcagcgggccggtggagattttcaccatcccgacggtgccggtcggagagaccagaccgttgaccacggagtcgttctgtcccagcagcgcgcggctggtggccacgccggtaaagacctggttaacgtgctgcggctgcacctggcgggagatctcgctcaccatcgccgactggttcggatcgcccgcgcccaggccaacggagagcgcgttatcaatcagcttcgcgtattcgcgcatatcggcaacggcgctcgccacgtccgggtaatttttggagagcacgcccaccagcacgtggccttccgccgcctcgtagatggcgctggcgttggcctttgagccagccagcacgttcagacagacgcggtcacggtaaaagttgggggtcagtttcatgcgtttttctcctgtcctaatacttcactaatgcggcggtacacaatgttcagctggtcagcgtttacgctgcgaacgtccgcttcgataatcccttcgttggccttgtagccacggaagtaaatggcgtactcgccctgcttgagcttcgccaccaggtcccccgtgccgaggccggtggtggcttcgtcaaacttaatctcggtgcgggcgatgtcgcgtccggcgctgtcccagaccacgcgcgcggtcacaccgttcagggtgttgagcgcctcgataaacggcgtcattttcgccaccatctcggcaccgctctctttggtggccgtcagatagtgttcgatggcgcaggtcaggccaagaatgccctctttacccaccttcatggcgcggccaatccccgccgtctggcgcttcacccactcaacgtactgggtcttgccgatcaccagcccgctggtggggccttcgatcgcctttgcaccgctgtagatcaccaggtccgcgccggcgcggtagtacgcgtgcagatcttcttccgccgcggcatcgacgatgagcggcaagtcgtgtttacgtgcgacaaccgccgcctgctcgacgctgagcatgcttttctgcacgcagtggtgagatttgatgtacatgatcgccgccgtgcgtggggtaatcgccgccgccagctgatcggcggaacattcgttggcgtagcccgcttccaccagcctgccgccgcccagcgccaccatggtgcccaccggcgcgccaaaattcacgttgtggcctttcggcaggacgatctcgttgttctcaatcggggtgacgtgcaggttttccagcagccagtcgctgtctttcaccagcaccgcggccacggactgggcaatgcccgccgacgcgcaggagaccaccgtcgccccttccacgtccagcagcttcgcgatgtattctccggttttattgaccagatccttcatctcgaaatagtgattcatgccgtccatcgccgcctgtaccacctccggacgcggcgtggagacgcccagcgccgtcatgcggccagaggtgttgataacctgctttaagcggtacttctcataaatcgaaggcatgttccgtgctcccttgttcagtcatgtagcccttgcccgcgcggatcgcggcaagcggcaccagtatgtgttcagcctgtaggctgtcgttttcggcatccgtcagcaccgtcggctggcgtttgagcgtgaacagcgtcaggtcggcatcgagacccggctgaatgcggcctttacgcgtcaggcgcaggccatcggcggcgttcgccgtgacgcagtcaatcacctgcggcaatgacatgccgatggcgaggaatttcgacatcacgcttgccagcgagccgaccgggccgttgatgcggttgcggcagtagatatccgagctgatggtgtgcggcagaatgcccatcgcgatggcgcgtttcgccacctcaaagctgaagctcgccgtgccgtggccgacatccagacgcacgccgcgcttcagcgcagacgtaatcgaggcacgcagctcgccggagggcgtcagaatgcggttaggcttgccgttgtagcagtgggtgatgatgtcgccagagctcagcagctcggcaatttcgtcgaggttcggcgggttgttgccaatgtgcaccatcagcggcaggtcgccgttctctttctgaatggctttggcgcgcgccagcggcgtgatgccgttgtcaccgaccacgctgctgctcatgcgcgccttcaggccgacgataaaatcagggtagcgcgtcaccgcctgcttcaccgcgtcggcgtcaatattggccatgttggccagctcgttctgggcaatcagccccacgcgggagatgttcagcagggcaaagacctcggtggaggccttgcgggtaatcgcgtagaaatcgtccacgtcgtcggccccggtgctgcccgcgtccaccacggtggtcacgccggtggcaatgcccacgctgtccggctcgtcgtggtaaatcggggagttcgggtagcagtgtacgtgggagtcaatccagcctgcgctgacgaacacgtcaccgtttagctccaccgttttgcgggcgggggcgtctatgtcgcccgtcgcggcgatcttcccgtcctgaatggcgatatcggtcagggtatcgtcggcgaggcgcgcacggcgcaggagtaaatcaaacatgaggatctcctgaaaaggcaggcgccgaagcgcccgcgggtattaaagggcaaccgggaacagccagcccagaatcattgcgccgaggatagcgccaccggtaatgggcttctgccagatgtagaacagcagcgcacccagcagagaacccacgccaatcggaatggaggcggtcatggcgctgaggataatcaacggtccgaggaagcggccggaagcgttgcccgcccccatcatcacgtctgcgccgtaggtggagttgctctggttgatggtgaacttacgcgccaggatgatgacgtagccaatcgcaaggccaatcaccaggccggtgatcagcgcggcaatgaagttggtcaccgggaacatgatccccgcgcccagcagcagcgccggaaccccgaggcccacgccggtctggatcgccccgccgatgtcgagaataccgaccagcgagccttcgataatacgggcgaacaggaagctcgcgccgaacgccgccaccgcgccgtaaacgccggtatcaatccccgctttcagcatcgccacgaaggccacttcgttaaacgcgccgatgccgtagaggtagtacatgtgcgtcccggcaaacacgccggaggagagcaggccaacgaagatcgggaacgaccagtcggcataccaaaaacctttattctgttccatgtcgaggctcctgttatttaccgctgagcgagttgtggatcatgtcgagccagttcggcacggtcagatggaaggattcgatcatcttcatgtcgaaaccgcggaagaagccgctcagcacgaagagcagcacgatcgccgccatcatcactttggtgacgtggttccagccgctctcttccacgcctttaccgatcaggatccccagcaccaggcccggtacggcgttgcccataatcagctgcgccgcgccgccaaagatggtggcccagaagcccgattttttacccgcgtcgatggccgccagccagaagatcaccggcatcacggtgttgaccagcaggttcgcggcgggcaccagcaccttcacggcggtgacctgaagcgcagcgggcacggaggaggcggtcaggttaaggaaggtcacgacgatcatgccgatcacgccgcaggcaatcgccattttgcgcggatcgtgcagcgtttcgccgacgttacggtttttgatcatcagtgcggcagcaccccagtttgggatgatgcggtggtcaacgtcctgtgtgaaagcccctgcggccacggaagaggcccaggcgttaaagaagaagcctaacccaaaggagaagtgggacgccggatccccttcgcaggagttcagttcccccaacgtacgaaacgcgcccataccctgagtggtaggcgcatgaaacatgcgtgcagccccggccccgacaccgacgcctaccaggccgccgatgatgagcgattttattaatataattaagaacatcagtctgcccttttatgaataatcagcgttgcgtgacgaaatccacctggtcgagattgatggctgtcacgttgacggtcacatccagctccacgctgtaggtgcgtctttcccggcgcagaaagaagaacagaaacgcttcttttcgcaccgcttcttgcgcctgaacaacctgcacatcctgtggctcaatacgcagtaagatatgcggtgaggctttcatcaccgcggcctgaacgtggttgagcgcgtcggcaaaggcgcgcgctttggcgtcgcccttccccttcactctcaccgtggttgtgaactgttctttcatgcttatgcgccgtattttttctgccacgcctgtaccagacgctcgcccagctcttctttatccataaagccaaagcccagcacgttacagccttcgttgatagcggtgacgccttcatccacggaacgcatgccgtatttggccttgtagccatatttggtctgggcggtgatggcacccgcgccgccgctgccgcagaaggagatgccgaaggtggcgttttctgctttcatcacgtcaccgagcttcatgtctgccgccatgcccggtacgacaaccgcgcgtccacctgctttttccacaccggccgccactttctgacctttacccaggcgatcgccaatcacgactgtaatctgttccatgtgttgctccttaaaggttgtctttcgcgacttcaaagtgaacggagagcagccaggcttcttcatcaggaaggttgccaaactgcgctaccacttcacgggcaagccgcattgaatccggtgaaatttcgtcaaacagctctgcttcaacctccggcagcggctcgccggtcacggaccggtgcgccatggcgcgcacgtgggaagtaagcatctgctcctgtaccgcattggggatgatgttgttccgggccagcagggcataaacctgctgcagcatggtgttcgcgagctgttctgtttgctctgcctgttccccaacgtcgttcattaccgctccgttaatcactggtcttaccccgttaatggctctggaataaaactaacgttgggggggaattgtttgtagcgagttgttttccacttcgaagtggaaaggggagccgcagcagtgatctgtgccacataaatacggtgaatctggattaatcacggcatttgcgtgatgaatatcacgtattccagcggcaaaacgcgcgccggggaaacgaaaacgttcaggcgtggtgacgcaaaaatgtgatggcgatagggtttacttattaccgcgcaaaaaaaaacgggggccactggcccccgctggttgtttgtcagatgcgcgatcggttaacggtatttcttgtgatacgtattacgggtcgtcacaaactgctcggccgccgcctgggcttccttcactttgccttcgttagcgagcttcagcgcgccgtcgatctggccgaccagcacgtcaaagccgtggcggtagtctttcatctctgcactgtctgccgctttgctttccagtttaggaggcgtcgctttttgtgcgtccagcgccgcttcacgcattttggtcagcgcgtctttcatttccgccgcattgtcggttttctgcaccaccttcaggttttgcccgaggatgcccatgtcgtcttcaagatcggcagcaaacgcagaagagccaagaaccagcgttgaagccgcgacgatcgctaacagatgtttacgcattgctcacttccttttttattattaacaaaacgctatctctattgtccggcgattttcatttccgggagtaatacagaaccacactgtatattgctgcgtgtttcaatatcgttaccgaccgtaacgatattgcgccacatatccttcagattgccagcgatggtaatttcgctcaccggatactggatttcgccgttttcaacccagaagcccgccgcgccgcgagagtaatcgccggtgatgccgctgacgccctgacccatcagctcggtcaccaccagaccggtgcccatctctttcagcatctgctcaaagttgaggccctgcccggcaatgcgccagttgtgaatgccgcccgcgtgcccggtgcttttcagccccagcttgcgcgcggagtagttggtcagaagccactgggtcagaatgccgtctttcacgatgtcacgacgctccgtgcgcacgccttcgctatcgaacggcgtggaggccaggcctttcagcaggtgcggatgctcttcgatggtgagccattccggcaggatctgcttgcccagcgagtcgagcaggaaggtcgatttacggtaaacggagccgcccgcgatagcgcccaccagatggccaaacaggccggtcgccacttcgttggcaaaaatcaccggcgctttcatggtggagagcttgcgcggcgacaggcgagacagcgtgcgttcggcacactctttgcctacccactccggagactgcaaatcccccagcgcgcggccaatggtataggcgtagtcgcgctccatgtcaccgttctcttcggcgatgacgcaactggagagcgagtggcgggtagagcagtagccctgcagcatgccgtgactgttgccgaagactttgatgccgtagtggctgttaaagctgccgccttcggtattggtgatgcgcttgtcggcctgcagggacgcctgctcggcgcgggcagccagctcaatcgcttcgtccggcgtcacttccgccggatggaacaggtcgagatccggcgcgtcaaacgccagcagatctttatccgccacgccggcgtaaggatccggtgaggtataacgggcgatatccagtgcggcctgcaccgtacgggcgatggcatccggactgagatcggtggatgacgcactgcctttgcgattctggtggtataccgtgatacccagcgcgccgtcgctgttgaattcaacattctccacttcgccatagcgggtgctcacgctaatgccggtggttttgctgaccgccacttcggcgccatctgatttttctgaagcaagcatcagcgcggtggagacggcttcttccagaatcttacgctgcgcttcaacttgtgaggttactttcatcgcaaatgccatactgtaagagagagttaactgaagtctaacagagaaccgtttttcagtgcgcgtcttaactggtaacattagcctctttttttaaggagcctgacatgactaagcagcccgaagactggctcgacgacgttcccggtgatgacatcgaagacgaagatgatgagatcatctgggtcagtaaaagtgaaattaaacgtgacgccgaagagttaaaacagcttggcgcggaaatggtagaactgggtaaaaacgcgctggataagatcccgctcgaccaggatctgcgcgatgccattgaactggcacagaaaatcaaaaaagaaggccgtcgtcgccagcttcagcttatcgggaaaatgctgcgtcagcgcgatgttgatccgatccgccaggcgctggacaagctgaaaaaccgccacaaccagcaggttgcgctgttccacaagctggagcagatccgcgatcgtctgattgaacagggtgatgacgccgtaccggaagtgctgaacctgtggccggatgccgaccgccagcagctgcgttccttgatccgcaacgcgaagaaagagaaagaagggaataagccgccgaagtctgcgcgcctgattttccagtatctgcgcgagctgtctgagaacgaagagtaatccgttcccctcaccccggaggggcgagggggaaaagaacgtaggcccggtaagcgctagcgccaccgggcttttttttacgcctcggcggccgcttccgctttcttcgccagcccgtccagcagcttctgatggatcccaccaaaaccgccgttgctcatcaccagaatatggtcgccgggctgagcggctttcaccaccatatccgcgagcgcatccacatctgcactccagtgcgcaggctggatgcaggcatcggccacttccgccacctgccacggaatatgctgcggctgaagcaggaagacttcgtcggcgcgtcctaacgacggcgcgagatcgtctttgcagatgcccatcttcatggtgttcgagcgcggttccagcaccgccagaatgcgcgcggtaccgccaactttgccacgcagggcggcaagcgtcgccagaatggccgttgggtggtgcgcgaaatcgtcatacacggtgacgccgtgggcttcaccgcgcagctccagacggcggcgggcattgataaacgagcccagcgcattcgctgcatccgcaggctgaacgcccacgtgacgcgttgccgcaatcgccatcaggccgttgtgcatattgtgttcgcccaccaggccccacttcacctcgcccactttttcgccgtcgagcagcacttcccactcggaggcatcggcgttgagtttcttcgcctgccagtggccctgctcgcccaccagctcctgctcgctccagcagcccattgccagggtctgcttcaggttgatgtcgttttccggcaggatgatgcggccctggcccggcacgatgcgcaccaggtggtggaactgtttctgaatggccttcaggtcgtcaaaaatatccgcgtggtcaaactcaaggttgttgaggatcagcgtgcgcgggcagtagtgcacgaacttggagcgcttgtcgaagaacgcgcagtcatactcgtcggcttcgatcacaaagaacgggctgtcccccaggcgcgcagaaacgtcgaaattacccggtacgccgccgataacgaagcccggcttatagccgcaggcttcgaggatccaggtcgccatgcccgcggtggtcgttttgccgtgggtaccggcaacggcaaccacccagcggtcgcgcaggacgaagtcatgcagccactgcgggccggacatgaacggaatattgcgttccagtaccgcctcaacgcacggattgccgcgggtcatggcgttgccaataatcaccaggtccggctcgggatccagctggctggcatcgtagccctgaataagagagatgccctgtttctccagaagtgtgctcattggcggatacacattggcgtccgaacctgtcacctcatggcccagcgagcgcgccagcattgccagtccgcccatgaaagtgccacaaatccccaatatatgaatgcgcatacgtcactatccttctttaatgtggcgcacattttactcacatgttagcggctgtgaaacgcatttcaggtaaatccgtatgttgctggcgcgattcacctctgcgctactatttgaatatttgttaagattgttgggctttagtcgttttagtgaacatacaatcgctctactcacaaagatgcagggaaagtgttatgaaaacgttaggtgaatttattgtcgaaaagcagcacgagttctctcatgctaccggtgaactcactgctttgctgtcggcaataaagctgggcgctaagatcatccaccgtgatatcaacaaggccggtctggtcgatatcctgggtgccagcggtgccgagaacgttcagggcgaggttcaacagaaactcgatctgttcgcaaatgaaaaactgaaagctgcactgcgcgcgcgcgacatcgttgcgggtatcgcctccgaagaagaagatgaaattgttgttttcgaagggtgtgaacacgcgaaatacgttgttctgatggatccgctcgacggctcctccaacatcgacgttaacgtttctgtcggtaccattttctccatctaccgccgcgtcacgcctgttggcacgccggtgaccgaagaagatttcctgcagccgggcattaatcaggttgctgccggttacgtcgtctatggctcctccaccatgctggtctacaccaccggttgcggggtacacgcctttacgtacgatccttccctgggcgttttctgtctgagccaggaacgcatgcgcttcccggagaagggcaatacctactccattaacgaaggtaactacatccgcttcccgaacggcgtgaagaagtacatcaaattctgccaggaagaagataaagcgacgcagcgcccgtacacgtcccgctatattggctctctggtcgcagatttccaccgtaacctgctgaaaggcggtatctacctctacccaagcaccgccagccacccggacgggaaactgcgtctgctgtacgaatgcaacccgatggcgttcctggccgaacaggcgggcggtaaggcgagcgacggtaaagagcgtattctggagatcgtgccggaaagccttcaccagcgccgttcgttcttcgtcggcaacaaccacatggttgaagacgttgaacgctttatccgcgagtacccggacgcgtaatccctctcttcaggggagccgatccggctcccctgttcatttatatattttaccgtataagtgtttataaaaaacacgctttaatattcgccactgctcctgcattatttccataacagtttgacagatatttcgtggagcagaaacgcaatgaaaaattattcccgtgctaataccggcattgatttaaatcttatccctgtatttattgaaatcgtccgctgcggcagcatggcaaaggcctctttgcgtctggagatgtcacgccctgcggtgagtctggcattaaagcgttttaatcaactctttgatgagccgttatttctccgcaaaggcttatatcttgagccgactgaaaaagcattagccttaaccagctcgctggaaatattaatgggcgaaattcacgataatatcggggcgcttaattccggaaggaataaaaccccggcacagaacgtaccggggctgggtaatattatgccgcgttctgagtcgtcactttgaatgatgacatagcttccatcagctgacgcgactgctcctcaagggagcgggtcgcggcggaggattgctgcaccagcgccgcattctgctgcgcggtttcatccatctggtttaccgcaatattcacctgctcaatgccgcggctctgctcctgagacgcggtcgcaatctcacgcatcagtttggtcatgcgcagcacttctgttgcgatctcatccatcgtttcgcccgcctgctgggccagctcgctgccctcgttaacgtgggtttgcgaatcactgataagagaacgaatctccttcgccgcgtcggcgctgcggctggccaggtttcgcacctcgcccgcgacgacggcaaacccgcgcccctgctcgcccgcgcgcgccgcctctacggaggcgttaagcgccaggatattggtctggaaggcaatgccgtcgatcacgctcaggatgtcagcgatgcgcgccgagctgccggagatatcgcgcattttttcaatcacgtagcagaccatttcgctgccgtgatcggccgtgtcggagaccgacttcgccagctggtgcgcctgctcggcgttatcggcgttgagcttcaccgtggcggtgatctgttccatgctggccgccgtctgctccagcgacgtggcggtggattccgttcgctcggcgagatcccggttccccagcgtcagctcgcggctgccggtgtcaatctgcgcgctggcatcgcgtacccgcagaaccgagttcatcagcgactgacgcatctcctcaatgaccgcgttaaggcggttaaactcctggctcgcgggcgcggccagcgtatgggttaaatcgcctgccgccacgttctccagctgagcaatcgacgccgagagaggcttgagcagcatatggcgcagcgccagccaggccagcacgataatgcccgccgtcagcagcgccgccacgataatcaggatcaggacgcgggttttgctcgcctgcacggcactcacttccgcctgacctcgcgcttcgctccatttctgaaacgcctgcatgtcgttatcaaacgctgacgccagcgggatcagcgtcttctccagcaggtcgtaatacccgtccgcgctctggtcattgagggttttcagcatcgggttgatcccctgctggttatacgccgccaggctggctgccactttatcgagcagctgctgcccctgctcgtcagccacgccgccgtcgatcacgcccttcagcgttttctgggccagggcgacttcctgattaatgttttttaccgcgctggccgcatcgtccagcatgccgatttccatcatgcggacggcctgacccgcttcattgcgcgcgcgcaggatcagcgtatagcctgaataaagctgcaccatctgctcaccctgaaggtgattaatacgctgcagcgaagaagaactctgtgtgagggcataaatgccaatgccactgacaatcagcagcagaagggtcataacggccagtaaagagagcaagccggtacgaatcgatagcgttttcagcatgatattatttccggtagcgagatatttctgggcataaaaaaagagtatcggccgctaccggaaaatgtttagactttcagcatgttatcgctctgttaccgatgtgttcacgcgggtaacaggcgagctttggcggttctcccagagcaccgtcaggccgcgctgcagggcaataaaaataaacagcagaatgccgatggcgatcttcgtccaccaggagctgagcgtgccgtcaaagttgatataggtctggatcagcccctgaatcgccacgccgaacagcgtccccagcaccgttcccacgccgccgctgagcagcgtaccgccgatgaccacagaagcaatcgcatccagctccacgccaacgcctgcaagggcatagcccgcctgggtatacaccgagaagacgatccccgccagcgtcgccaggccggtcgagagcatatagatgcggatggtggtgctgcgggtcgagatccccatcaggttggccgacgtggcgttgccgccaatggcgtaaacctgattgccaaaccgggtgcggtgggcgaggaagatgccaatcactaccacgcccagcatcagtagccccatcgcgctcaggcggccgccgccggggattttccacgccaggctggagagcgtgtcgtacaccggatggttaatgggaatcgactcttccgacaccaggtagctcaccccgcgcaggaagaacatccccgcgagggtaatgataaatgccggaatttttaacgcgtcgatcagcagccccataaaggcgccaaacgcgcagcccatcaccagcaccagcgggaacgccagcagcggtgagatgccccagaagccgatcgctttcgcgaggaacacgcccgtaaacgcgatcaccgagccgacggagaggtcgatcccgccggagaggatcacaaaggtcatgccgacagcgatgatgcctaaaaaggcgttatcggtcaggatattgcagatcacgcgcgtcgaggcaaaccccgggaactgggtcaggcagtagagatagcccagcacaaacacgcccagcgtgatcattagcggcaaattacgttttatcatggccacggatccccttaatgatgctgacaaagcgcggcgactggacgatcagcacgcagagcacgaccaccgctttcaccacctggttgagttccggctggaatcccgaaagcaggatcccggtgttcatgccctgaatgatcagcgcgccgatcgccgagagcagcaggttaaagcgcccgcccatcagcgacccgccgccgatcaccaccgccaggatcgcatccagctccagccagagcccggcgttgttggcatcggctccgcgaatatccgccgcgacgatcacgtcggcgatggcagcgcaaataccgctcagcacgtaggtcagcatcaccatcagccgcgtgttgaccccggcgttgcgcgcggcgcggatgttgatcccgacggcctcaatgaacatgcccagcgccgttttgcgggtgaaaagccagaacaccacgagcgtcaccagggcaataatcaccggcgtcgggaagaacagaaggttgccgctaccgagccacgccaggctcggggagttaaaggtgacgatctgcccggacgtaatcagctgcgccacgccgcgcccggccaccattaaaatgagcgtggcgacaaagggctggattttcagcaccgccaccagaatgccgttccataatcccgccagcacgccagtgcctaaggctgcaagcaggaccaccggcaggctatgcccggccacggtcatggaggctgccgtggccccggcgatagccatcaccgcgccgacggagagatcaatcccgccggtggcgatgaccagcgtcatcccgatggccagcagcgccacgggcgcggcgcggtttaaaatgtctatcgggctgccaaacaggcggccatcctgcacgataatctggaagaaatgcggcgcgacaaggctatctaccagcagcaccaccagcagcgccgcgatttgcggcgtgccggtcggccagctgaagcggcgctttgactcaccggtttgcgaaagcgaacgggacatcacgattcactccttatgccgcgatggcattcatgatcgccggaacggacagcttatccagcgggatctctgccacctgtttacgatcgcgcatgatgatgacgcgatcggcatagcccaccagctcttccagctcggacgaaatgaccagcagggccagaccgtctgcgcacagggtttcgataagccggataatttcggcgtgcgcccctacgtcaatgccgcgggtcggttcgtcgaggatcagcaactggggtttggtcagcaaccagcgggagagcagcactttctgctggttaccaccggagaggaactcgatgggctgttccgcgctcggggtgcggatgccgagctggcggataaagcgctcagcaatggcgttctgctctttgcgtgggatcggccgcagccagccgcgctgcgcctgaagcgccagaatgatattttcccgcaccgaggcggcggcaataatgccgtccgttttccggtcctccgggcagaagccgacgcccaggcaggaggcctgatgcggcgatcgcagggtttgcggtttgcccttgatcagcgcgctgccgctgtcggcgggcttgatcccgaagatcacctcggcggtctcggttcggcccgagcccagcaggcccgccagcccgacaatttcgcccggccgcacctcaaggttaaatggcgagatgaccccttttttgccgtaatcgctgaacgcggcgaccggcttctcgcccttcagcgtgcggcccgcgcgctgaagggcgttggtctccagctcgcggcccagcatcattttgaccagctcgatctgcggcagctcgcgggtttcacggcagccgacaaagctgccgttgcgcagcaccgtaatgcggtcgctcacctcatacacctgatcgaggaagtgggtaacgaagatcaggctgacgccctgatcgcgcagctggcgcattagggtaaagagcatttccacctcctgggtatcgaggctggcggtgggttcgtcgaggatcagcacctttgccgagagatcgatcgcgcggcaaatggcgacgatctgctgcatcgccacggaaaagcggttcagcggctcgcggacgtcgagggagaagccgtaggattccatcagcttagtcgcccgcgcctccatctctttacggcgcagcaggccaaagcgtcgtggctcacggccaataaacaggttatccgccaccgacatattcggcagcaggttcacttcctggtataccgtcccgatccccaactgctgggcatgggcggtgtttttgggcgaaatggcgttgccttccagccagatggtgccgcggtcggcgtgataaacgccggtcagagatttaatcagcgtcgattttcccgcgccgttttcccccagcagcgccatgatctccccgcgccgcaggctgaaatcaacgttatccagcgcctttacgccggggaagaatttactcaagccctctgtgcggaggatttcctggtgttgttcagtggtcatggtttccccctgcatcaagccggatggcgctacgcttatccggcctacaaaagagcgcatcgtaggccgggtaagcgcagcgtcacccggcatgttcagacaggcttagtagcccatatttttcttcttctctaactcttctttcgccgtgtcaggcaggtagagcgtggatttggtgaccgtcactttctccggcatcgtgccgtctttcttgaatttctccagcgcgtcgaatgccgggccggccatgtttggcgtcagctccacgctggcgttggcttcgccgtcgatcatcgctttgtagatatcaggcacgccgtcgatagagccagtgaggatatctttgcccggcttcaggcccgcttctttaattgcctgaatcgcgccgatcgccatgtcatcgttgtgggcgtaaaccatgcagatgttcttgccgttgttttcagccttaatgaagctctccatcacctctttacctttactgcgggtaaagtcgccggactgagagcggataatcttgatgtttggcgctttcgcgatggcttcagcaaagccttttttacggtcgatggccacgctcgccccgacggtgccctgcagttcaacaacgttacacggcttgccgtcgacctgttttatcagccagtcgccaattagctgcccttccagcacgttgttggccgtcacggtggtcatatagagagatttgtctttaacgtcgatggaacgatcgagcaggaagaccgggatttcagcgtctttcgcttccttcaggacgggttcccagccggtcgccacgacgggtgcaataaagatggcatccacgccctgggcgataaaggagcgcacggctttgatctgattctcttgtttttgctgaccatcggcgattttcagggtaatgccgcgtttctgagcttcgcttttcgccacgttggtttctgccgctcgccagccagattcagagccgacctgcgaaaaacctacggttaagggagcggccatcgccatagacgacatggctgccgaaactgctgtgacaaggagtaagcgcttccacatatgaacgtcctcgtagggtgagttattgttggttaaaagatgttctgcggaatgactatagcccatgaaatatgtaacgaattgcgttacatcacacttcagaaaagtgaataaaacgttaatcacaagtttgtaatcgctttcatttctccatgaaaaatgcggctgagtttatggatttttctgtcatggaatcggtctgaaaagtgggaagaacgtggagagaaggcgaaaacaggcggagacattcagcgcgagttggctataatacctgccacttgtttaccatccattttaaaggacaccgacatgagcttactcaacgtcccagcgggtaaagaactgccagaagacatctacgtagttatcgaaatcccggctaacgcagatccgatcaaatacgaagtggacaaagagagcggcgccctgttcgtagaccgcttcatgtctaccgcgatgttctatccgtgcaactacggttacatcaaccacaccctgtctctggacggtgacccggttgacgtgctggtcccaacgccatacccactgcagccaggcgcagtgattcgctgccgtcccgttggcgtgctgaaaatgaccgacgaatccggtgaagatgcgaagctggttgcggtaccgcacaccaagctgagcaaagagtacgatcacatcaaagatgtgaacgacctgccagagctgctgaaagcgcagatcactcacttcttcgagcactacaaagacctcgaaaaaggcaagtgggttaaagttgacggctgggacaacgcagaagcagcgaaagcggaaatcatcgcctctttcgaacgcgctgctaagaagtaattcttactgctgttaatgaaggccccgcgagtcggggcttttttatttccctggtttaaagtagtacaaactgaattgttgagaataatcccattccttatgtttttgacattaaaaccaaaaaagacaccctatcatttatagtgggagtggttaaatagcctggctgttcacaacatactgtcatgatgatcattaatccccattcatgacaggattcatatgtcatccattaacattgatgttgcccgcccaactggaatttattttatcattgaacggttgtattcccgcgatggttttatgccttctattggggaaatcagcccctctttgacacaggtacaccgtactgtcattcagctaaaacgcaagcaggatatgtttatggatggtgttaaggttacccctaaagatattaccctttggcaacagataaaatatattacaggttcaaaagtaacgaccaaggatacagatgcgttagtgtattcgaccgattttatcggctcccttgttgccaccatgcctttaggtaatattgagcatgaaaatattcctcgcttcctcacgacagagtctatccactcccttccacaggcggtgagttatgggcgtgatcccatcccacaagtccttctttatggtcgtaaggatatagtcttctttatggacaatggtggtaagggtacgccaaccgctattgcaaaatataaccacaatactcgtgaccttgccataatcaaagatcagctagaagccagtaaaacgatgaaggagctgctatctaaaggagcaaaattatgagtaagaaaagccatgtcatgagcctattcgtccttattattgcctcctttgtctttggcagaagtacttatgttgaatatctgtcatggtactatggaagcgatcatttaatattcagtcaaacaaatagcgcattactatctggtttacttaacggactttacttcgcgctatcatcaagcattatttatgcgttactcactctattaaaaacaattccaagaaatatcttgttttcttgtcttctgcaattctttattaacatagggctatatacactttttgttgcagtagatagaggttatagtaaattgcatactttaggctcgggtgctactgatatcacccacagctattttttaggggcgttgctgatgagcacactcctgaccgtcgcgatcgtgagcgttatacatgctaagtttctttcttcaaagcataaagatgggctacataaaggcgtttgactgttacggtaaagacagtaaatggcagtatctctgcatcatgacattccagcttgcctggtttttgttttacttatggatcccttatcgaagcgattatgcgattctgctgtttttactgtgtttcctgcccgtcatttcaagcaatacgcggtgcataaactactatggccgttcacgcgccttgtgttttttatggcttattgcgccgtacatcatgctgttcgttcctctgtttttaacccgacgccgggatacagaagagagttgaaggaataaaaaaaacaacgccaccttacggtggcgttgtcgtttttcagtactggtctctgtctaaccagttaccgcttacgatccgcgttaacccgtcgactggacgctggtagacatacatccacgcgcttccgtacggcgtctggatcaactggcgtgcgtattcaccgcccctggtgcgcaaggcatcaagttcggcaagcgtcgcgttatcaatacgataaacttcaccctgtactgttccttcgcccggaaccgcgcctggatagtggcccaggctgtacaactggtagttctcgatattgtaattccccagtagctgggcattggtcatccagtgactgttgccttgcctggttcgtaaactgccgtagacaaatattcgcattgctaaaactcaaactgatagagcagatcaagtgcctggtctacgccggacactgcttccagatatagcttaggcatcaggcgatagcgtaacgtgagtgttgccagtgagtcaaagatccccacaccatattttacctgcagacccggcagtacatagccgctgaccaccacctgcgaggagtcacccacgccctgggtgtccagcgccagattgcttacgccgaacgtctcgccgattttacccacaacctgcccactttgtgcaacccccagccccactaacatcgaagtcatcgccgcgctgtcgctctgaccgctgtcgagaccttgaccacgcagcaggtaagagagggcttcctgctgggacatcgccgggtcagagaagatctccgccttcggttcgtcggcggaaccggtgacgcgtaccccggcaatgacgtcgttttccgtcgcttccgggttacgaatcgcttcaatgttcagcaagggttgatccggtggaccggagaacagcagctcgcctttacggacaatcagatcctgaccataggcgtggaatcgcccttcagggatattgatctgcccgttcaggccaagcccttgtttatcctgcgccaccttcaggtcgcccgtaagcctcgccttcagcccaaacgcatccaaccgcacgttattccccacgtgcacgataaggttactattaatcggtatgcccgcgctcttctgttcgaccggtttcagattttcattgagcataacttcatcacttgagacgccgaccgcactttccggcacgtcgtgaaccacgatgcgcgcccacggcacgtcaacgcgaccgtcaagcgtgaagaggcttggcgtggcttcaaagaccacatcaggcgagacgtccagtcgcaccatcggcggtacggtgatgcgcaccttactgcccttcgcggcaatacgggcgcgccagttgtcgagctggctccagtccgcgtcgccgctcaggttgatttgcccctgctgcgtcagtaccgatccgctcagcgtcgagctcatgccgttgaagttcatcgcgatctggctgggctgcatgtcaaacggcataaagttgccgtcaatatccacgccgctgaggcgcagctggccgaacagctgagggctttgcgcattgcccgccaggcgcaggttggcgttcaccatgccctcggctttttccccgcgcgcgaaaatcgggttcaccatcgccaggttgaagttgcggatagtgacgttgccgcccagatttcgtcgtccctgtgggtcggtaatttgaaccttgccgtcaaactgaccgttgttggtgagacgaatcagccagcccagctccgcacggttgttatgcaggtccgcgctcaggttcagggtgtcgaaggccaccggcagcggcgcgtcattcacctcctgcgtcaccttcacgttacgcccggacagcgtgacgctaccctgcggcagcccctctttggtggtgtcccaggcgacatcggcttttccgctgaagacgccgctggcctgggtagtatccggcataaacggtttcagcatcgccagatcgaagcggttgaggttgatctgcgcgcgtccttccgcgcccgcgtcgatggtctgcggcacgcacagttccgcattcgggttggtccagcagtgcggcccaatgctgatcttctgctcggcgttgcggtagtccagcgcgatggcgcgcgacagcgccagcggcccgaccggcgtattgaaacgggtgttatccagcgtccctttccagcgctcctctttgcggtcgaagctgccggtcaggtgaagctggccggagaccggctcgccctgcacgcgcagctgcaggtcgtgctgcttctcgttccctttcgcgtccagggtgaccaggctgatgttgacgtccggctgagaaatgcgctccacgcgcaggttcaggtttccgccgatctggtcagtggatttcacatccccttccacgcgaacgcgggcaacgctcagcgcctgccagcgcaggttattggcggtaatgtccgccagcagctgcggcgcgtctaccgtgccgcgcaccttcaggagccccttcgccgtaccgcccaggcccggcagggcgttatccagattcggcgcgtcgatggtggcgtccagattgagatctttcacccccagctcgcctttgatatccgccgtgttgcggcccagcgccacgtgcagacccgggataacccactgcaggtagctgttgcctttcaccgagccttcaacgtttaccttgttctgcttcacgttcccggtgagcttgatctccggcacgtccatctgccacgtgccgccgtacaggctgccgcgggttttgatcaggccatccagcttcgacggccagtccggcacctctttggcggtgttaatgcccgtcagcttcagctcgccgcgccagctgatcgcctgctgccagtcgagcagcgcggtcaactcggttttgccttccagcgccgcgacggtcagcttgtcgaggttaacctgctgttcattgcccttcgcatccagggtgatgttcgcgggcggcacgccctgccccttcactgcggtgcggaacgagagcgtatagtcggtcatcttaccgctcagcttcagcttcaggtcatcggcctggtactgtttttcgccggtgaatggccagtaaagctgcttgctgaccacctcaagattgagcggcagcccggcttccgccagctgggtttgcgcgcacaggaccatgtctaccgggccggagagattgaccccgacatccagcttctcgcgcagcgccccgcccactttgaccttcaccttctcgcctttgagcgggtcaatgttcagggcgctattcagcgtgatatccaccggccagttgtcgcgcagcagggcgttgcctgacgcgttcaccgagccctgattggtgtcgatatccagcgcgtcgagcttcatattgccgtcaatgctgctgactttcagcagcatgttatagaccgtcaggtcggtatcgcctgtcaggcgcagctgctcgcctttgaactcttcaatattgaggttcagcggcagatgcacatcggtcatttccggcaggacaggcttcgagaagaggtctttcagcgtttcgcccagcggcttctcttccggctgcgggttctggatcttcggctcgacgatctcttcctgcgccacgtcggccactttcggcagcgcgatcagcaagccctgcagggaggttggcgtcagggtgaggtttttctcctgccagcgcaggccagagctgaaatccatcacggacacggtggtgtcgtcgattttgacattgacgttatcaagcgccacccgataaagcgcgatcgggtacggcgtggagagattcagcggaccgctgtcctcttcctctaccggcgcagacttcggcattttcttcgaatctatcgccacgttgacgtcttttagcgacaagtcgttgacgcagagcttgctgtcacgcagacagcccagcttcaccgccaggtgaaactccccggcgttcaccgccacgcccggctgctcatagcggatgttcttcaggcgcaggtcgcgccagccgcccgtcacctggccaatctccagccccggcacccagcggttcgcggcgttaaacagcaaatgcagcccggtcgtcgttcccaccagaaacgccaccgtaccgagcagcagcacgataaaaatcagcaccccgaggcttatcttcttccataaactcataattcaggccccagaccgatgtaaaactgtaatccgtgttcttctttgtcgcccaccggcacggcgaaatcgagcttgatgggcccgacgggtgactgccagcgtacgccgacgcccgcgccggttttaaaatcgctgcggcggatatcgctcaccgcttcgccgccgtcgacgaacatggcgccccaccattttccgctgacgttgtactggtactccagcgagccggtagccagcttagaggcaccgatcagcttgccgtcatcgtccttaggcgcgatggatttgtatttatagccacggatgctgcgatcgcccccggcgaagaagcgcaggtccggcgggaccttgtcgaagtcgccggtttcaatccagccgaggttgccgcgcaccacaaagcggtgtttgtcatacagcgtgcggatccagacgttctgcgcctgaatcaccgagaaatccacgtcggaaccccacatggtgttggagtaatcgatagagtaacgctgggaatcgccccaggtcggcatcaggccgccgcgcgagcgggtgcggctgatcatcaccccaggatagagcagcatggtggtgttggtgacgttggcctgggtaaagtgatccaggctccagcgcaggttgatggcgcgctgccagccgctggagagatcccagtaacgcgacacggcaagcgtggtggaatcggactcggtatcgttcaggtcggtgcgcttaaagcccccctgaaccaggtaatattgctcaagcggatttttcagcagcggcattttatagctgaaatcgagctgctgttccggggcggaaatgctggcgctggtggtcaggctatggccgtaggagttcatccacggctttttccaggtagccttcacgcgcgggccaacgtccgtcgaatagcccacaccggtttcaatggtgttctcggtgcgcggcgaaacaacgccgtgcagcggcaacaccttggttttgcgagacttatcaaattcaggggcgacaaccacggagttaaaccagccggtggcagagagccgtcggttcagctctcccaggtcgctcgactggtagtaatccccttttttaaagggcacgaggttttgcaggtactcttcacgaatttgcgacccttcgaacgtcacgtcgccaaagcggtagcgttctccgctgtcgtagtcgatatcccagaaggcctgacgtcgcgccagcgcaatgcccagctggcttttattgaactggctgtcaaagtagcccttacgcagggaaacgctggtcagctcttttttgaagtggtcgtagtcaccgtggttgagcacggtgccgattttcggccgcgtgctgagcaggtccaggtaatcccggtcggtacgcgccccgccgcgcaggatgacgttggtgccgccaatcagcaccggctcgcccggcgaaacgcgggcaataagcacctggcgccccttctttgggggcgggcggagatcgaaatcaatggtgggttcgtaataccccagcgcttttagtccttcacggatggcatcatcgacgcgcgcgcggaaacgccggtccggcgtcacctcatcactctggatggtcgatagctgcgcacgcacgtttttttgtagcgccccggataacccctcaacctgcaaacggacattcgccgcgctggcaatcccgcttgtcagcaacagactgactaaacataactggcggatttttgtcacgttttctcctgaatatccctgtttccaccctggaagcaaatgaagtgccgctccgcggcaaaatacggcctgttggccaaaaacccgaatctcgggttgaaaatgggtgtaacacccaaatatttcttatgattaaatctagactcattcagcgcatttattgtgttcaattaaacgcgccgtgacaaccttaaccgaaacatcgcaccccgggaggccccaccgtgagtttattcgacaaaaagcatctggtttcacaagctgatgcattaccgggacgcaacacccctatgcctgtggcgactttacacgccgtcaatggccattccatgactaacgttcctgatggcatggaaatcgccctgttcgctatgggctgcttctggggcgttgagcgcctcttctggcaactgcctggcgtttacagcacggcagccggctacacgggcggttacacgccgaatccaacctaccgcgaagtctgctctggcgaaaccggccatgcggaagcggtacgcgtagtgtacgacccgacggtaatcagctacgaacagctcctgcaggtcttctgggaaaaccacgacccggcgcagggcatgcgtcagggcaacgaccacggcacgcagtaccgctcggctatctatcctctcacccctgagcaggatgccgccgcgcgcgccagccttgagcgtttccagcaggccatgcgtgaagcgggcgatacgcgcgaggtgaccacggaaatcaccaccgcgaaaccgttctactacgccgaggacgatcaccagcagtatctgcataaaaacccgtacggctactgcggaatcggaggtatcggcgtctgcctgccgccacagctggcctgattatcagccgttagatcgtcgcccgtaccgggcagcacccgctgtccggtctgttttatgtaaaaatgtgacctctggcagatttacatctctttacgctatactacccgctgaaataatcggctcaacgctacgagctgatgttcaatgtgtttccacacaaatggtatcaactccccttctgaggatctggcgagaagccggataaactatgttaaacagtattttagtaatactttgtctgattgccgtcagtgcatttttctcgatatccgagatctcgctggccgcgtcccgtaaaatcaaactgaagctgctcgccgacgagggcaacatcaacgcctcacgcattctcaaaatgcaggaaaaccccggtacgttctttaccgtggtgcaaattggtctgaacgcggtggctatcctgggcggtatcgtgggcgatgcggcgttttccccggcgttttatagcctctttgcgcagtacatgtccgccgaactggccgaacagctgagctttatcctctccttctcgctggtgaccgggctgttcatcctcttcgccgacctgaccccgaaacgcatcggtatgattgcgccagaagccgtggctttgcgtatcatcaacccgatgcgcttctgcctgtttgtgttccgcccgctggtgtggttcttcaacggcctggcaaacgtcattttccgcatctttaagctgccgatggtgcgtaaagatgacatcacctctgacgacatttatgcggtcgtggaagccggtgccctggccggggtactgcgcaagcaggaacacgagctgattgagaacgtattcgaactggaatcccgtaccgtgccctcttccatgacgggccgtgaaagcattatctggttcgatttacatgaagatgagcagagcctgaagaacaaagtggcgcagcatccgcactccaagttcctggtctgtaatgaagatattgaccacatcatcggttacgtcgactccaaagacctgctgaaccgcgtgctggcgaaccagagcctggcgctgaacagcggcgtgcagatccgcaataccctgattgtgccggacaccctgacgctctcagaagcgctggaaagtttcaaaaccgccggggaagacttcgcggtgatcatgaacgaatacgcgctggtggtgggtattattaccctgaacgacgtcatgaccacgctgatgggcgacctggtaggccaggggctggaagagcagattgttcagcgtgacgataattcatggctgattgatggcggcacgccaattgaagacgtgatgcgcgtgctggatatcgacgagttcccgcagtccggaaactacgagaccatcggcggctttatgatgtttatgctgcgtaagatcccgaaacgcaccgactcggtgaagttctccggctacaagtttgaggtggtggatattgataactaccgcatcgaccagctgctggtgacgcgcatcgacaacaaaccgaccgtactggtgccgaagctgccggatgcggaagagaaagtatcggcgtaacgtcggtccccacaaacatcaacggctcccatcgggagccgtttttttaactactgcatagcacgttggttaagccatctcagtttgcagacgcataacctgacggttgacttcggacatcacagacaggtgctgtttgtccttcacttttgggacaaggattttgcccttatcaaactcaaaagcgccaacatccttgatatacaaccgtccacggaacaggatcttcacgtacttcgccacctgaagcgggttgtagcgttggaaaattttcattcttgtatctcctgcgaatcatacgctcttgcggtgccacaatcggcccgactgtcctgagcgcaaattttaatgcccaatgactatagaccagaactacggtgttacccagtgtgcataagtttatttaccgtttgattacaattattcagaataatctttgcaaagcgtgactgagcgcagtataagccgtcgttttttcatggatatgtgcgttcacccgcaaagtggcatcgggattgcgggaaaaccacattgatcgcacttatcattaaaagtgcatgaccaagtggtcggatcacctgcaaacaataaggaaacgccatgacactacgtactatccttgcagcagcctgcctgctgctgcccctgtgggcttgtgctcacaacattgaaaaaggacaacgtgtaccgccagtcggcattgctgaccggggagaattgattctcgacaatgataagtttagctataaagcctggaatagcgcgcagctcgcgggcaaagtgagagttgtacaacatattgccggtcgtacatctgcaaaagagaaaaatgccaacttggtggaggcgatcaaggcggcaaaattcccacacgatcgttaccagagcaccacgatcgtaaataccgatgacgccattccgggctccgggatgtttgtgcgttcaagccttgagagcaataaaaagctctatccgtggtcgcagtttatcgtcgacagcaacggcgtcacccgtaaggcctggcagctggaggaagagagctctgcgattgtcgtgctggataagaacggccgagtacagtgggtgaaagacggggcgctgacccaggaagaggtgcagcaggttgtcgacctgctgcataagctgctggctcaataaagagagacgcggaagccgggattgaggaaggattcgcgcggggtgtagtccagcggcttgccctgccagtcatgaacatgcgccccggcggccgcggcaacggcgtgcccggcggcggtatcccagacgttcgtcggcccaaagcggggatagagctgagcttgtccttccgccaccaggcagaatttcagcgatgagccaatcgaggtggtctggtgttcacccagctgctgcagatactcctgcagctcgctgtcgctgtgcgagcggctaatcaccaccagcggcggacgcgcgtcgcgcacctggatctgcttgcgcacgccgcactcttctttccacgccttcccttctgcagcgctgtacatcaccttcatgaccggcgcgtagaccacgcccagcaccgctttacccttctcaatcagggcgatattgacggtgaattcaccgttgcgcttgatgaactcttttgtcccgtccagggggtccaccagccagtagcgctgccagtgctggcgctcttcccagctttgcggcgcttcttctgacaggacggggatgtccggcgttaaggcctgtaaccctttcaggatcaccttatgcgccgcgatatctgccgccgtgaccggagagtcgtccgctttgctgacaacctccatgggtttactaccgtcatacacctgcatgatggcatcccccgcatcccgtgcgagctgacaaattttatctagcattttccacctctttgttaacgcagtgaggttaactctttgttttagttatatcgtaatgtgaacaattccgctatctgtgaagcaattccggtttcaggttgcttttttctgtcaggattcacatttatgtaagcaacacgttatagatacatactcttttgtggcctggatcgaaaaaaggactcttctgatgattaagtttagcgcaacgctcctggcgacgctgattgcggcgagcgtgcaggcagcgacggtcgatttacgtattctggaaacgaccgatctgcacagcaacatgatggatttcgattactacaaagataccccgacggaaaaattcggactggtacgcacggcaagtttgatcaatgcggcacgcggcgaagtgaaaaatagcgtgctggtcgataacggcgatctgattcagggcagtccgctcggggactacatggcgaccagggggctgaaaaaaggcgagatccatcctgtttataaagcgatgaacaccctggactataccgtcggtaacctcggcaaccatgaattcaactacggtctgacatacctgcatgatgccctggcaggcgcaaaattcccgtacgttaacgccaatatcaacgacgttaagacccaaaagccgctttttacgccttacctgattaaagagactgaggttgtcgatcaggacgggaaaaaacagacgctgaaaatcggctatatcggttttgtcccgccgcagatcatgacgtgggataaggccaacctcgacggtaaggtgaccgttaacgacatcaccgaaaccgcgcgtaaatacgtgccggaaatgcgcgaaaaaggcgccgatctggtggtcgttgtcgcccactcgggcctctccgccgatccgtaccaggccatggcagaaaactccgtttactacctgagtgaggtcccgggcgtcgatgcgatcctgttcggccacgcccacgcggtcttcccgggcaaagactttgccagcattaaaggggcggatattgagaaagggacgcttaacggcgtgccgtcggtgatgccgggcatgtggggcgaccatcttggcgtggtggatctggtgctgaataacgacggcggccgctggaaggtcacgcagtcaaaagccgaagcgcgcccaatttacgacgcggcagcgaaaaaatcgctggcggcggaagataaaaaactggtcgacgtgctgaagcacgatcacgacgccacgcgcgaattcgtcagcaagccgatcggcaaatccgccgacaacatgtacagcttcgtggcgctggtgcaggacgatccgaccgtccaggtggttaacatggcgcagaaagcctatgccgaacactttgtgcagggcgatccggatctggcgaaactgccggtgctctccgccgcagcgccattcaaagtgggcgggcgtaagaatgacccggcaagctatgtggaggtcgaaaagggccagctcaccttccgtaatgccgccgatctctatctctacccgaatacgctggtggtggttaaagccaccgggaaagaggtaaaagagtggctggagtgttctgccggacagtttaaccagattgacccacacagcagcaagccgcagtcgctgattaactgggacggcttccgcacctacaacttcgacgtgatcgacggcgtgaactaccagattgacgtcacccagccggcgaaatatgacggcgagtgtcaggcgatcaacccgcaggcggagcgcattaaaaacctgaccttcaacggcaaggcgatcgacccgaatgccactttcctggtggtgaccaataactaccgtgcctacggcggtaagtttgccggtacgggagatggccacatcgcctttgcctcgccggacgagaaccgctctgtgctggcggcgtggatcagcgccgagtcgaaaaaggccggcgaaattcatccggcggtggataacaactggcgtctggcgccgatccacagcgatacgccgctggatatccgctttgaaacgtcaccgtccgagaaggcagccgcgtttattaaggagaaggcgcagtatccgatgaaacaggtcgcgacggatgatattgggttcgcgatttatcacctggatttaagtaagtagcggcgattgtgccgggtggcgcttcgcttacccggcctacgggatggaagattatgggtaggccgggtaaggcgaagccgccacccggcttttacgccgcgcgatcgtcccgattcgccatcaccttcggcgtattcacctcaatccagtccgccagcgcggcgactttctcgctgacctcgatccccatcggggtcaggctatactctacgtgcggcggcacaaccgggtacgatacgcgatcgacaaacccgtcctgctccagcgcctgaagcgactgggacagcatcttttcgctcaccccgcccattttacggcgcagatcgctaaagcgatgcgttccctggcgcagcgccagcagaatcagtaccccccagcggctggtaacgtgtttgagcacctctcgtgaagggcactgttccgcgaagagattgccatcgcgcaattgttcgctgagcgtcggtatcgttgttttcatacttacctttttgtacgtacttactaaaagttagctatggtgctagtgtgccacaacaccagacaaacacgaaggagattcatcatgatcgcgattaccggcgccaccggccagcttggccatctcgttatcgaacagctgttgaaaaccgtaccggctaaccagattgtggctatcgtacgtaacccggcaaaagctgaagccttaagccagcagggaattgtggttcgtcaggcggactacacggatgaagccgcattcaccgccgcgctgaacggcgtggataagctgctgctgatctcgtccagcgaagtcggccagcgcgcgatccagcaccagaacgtgattaacgccgccaaagcggcaggggtgaaatttatcgcctataccagcctgctgcatgcggatacctcgccgctcggtctgcacgttgaacacgttgccactgaaaaagcgctggcggcgtcaggcattccttatgccctgctgcgcaacggctggtataccgaaaactatctggcgagcgcgccgcctgcgctggaacacggcgtgtttattggtgcggcagacgaaggcaaaattgcctctgccacccgcgcagactatgccgcggcggcagcgaaagtgattgctgaagagggccatgcgggcaaggtgtatgaactggcgggcgaccacggctggacgctgagcgaactggcggctgaactgagcaaacagagcggaaagccggtcacctaccagaatctcagcgaagcggattttgctgccgcgctgaagagcgtcggcctgcctgccgggctggccgatatgctggcggactccgatatcggggcctccaaaggcgggctctttgacgacggccatacgctgagcaaactgatcgggcgcccaaccactacgctggcggagagcattaaagccattctgtaattgttacgggatggttattttttgtggcatcccctcgggtcatctttgataatgaaaagatgacccacaaggaggctcaccgtgcaaggcgtaccggaacagtttaatgatgaaagagacaacgcgcgctttcgccatctggcgcagctaccgggcctggagctgtatcacgcgcatatttctgactacgcctttgagcctcacacccatgaagccttcggcatcggcacgattgaaaccggtgccgaacgctttcgctatcgcggcagccagcatctcgcggcggagaaatccgtcgttaccatgaacccggacgagatccacaccggcgaatccgccaccgagggcggctggcgctaccggatggtctatatcgaacccgatctgctggaagaggtgaccggcctccgacactggtggttcagcgacgtgacccgtcatgatccgttacgctcacagcaaatcggcaggcttatttacggcttgtggcacacggacgatccgcttgcgcaaaaaggtttactgctggatctgattgagaccttccagccgtttgcccaccacgcgccacgggttcaggaaggcgcgcaccgcttcgaacgggtacgcgagtacctgcacgacaactatatgcgcgctctgacgctggacgagctggccagcgtcgtctcgctcagcccgtatcatttccagcgccagttcaaagcccattttcacgtgacgccgcatcagatgctgatggccattcgactctggcgcgccaaagcgtttctcacccacggcatgcccgccgcagaggttgccgccgcaaccgggctgaccgatcagtcacatctgacccgcgcgtttacccaccgctacggcattacgcccgtgcgctaccagaagcaggttacacggcgctaatgcgcaatctcatacaatacgcgcgcattcgcccctcctacactgacgacagcgtaaatacctgtggatggaaaaatgattagtggagtgttgtatgccctgctggccgggatgatgtggggactgatttttgtcggcccgctgatcgtgcccgagtatccggcaatattacagtcgaccggacgttatctggcgctggggctgattgccctgcccctggcgtggctgggacgcgcgcgcttgcgccagctcagccgtcaggactgggggaccgcactggcgctgaccatgatgggcaatcttatctattacgtttgcctcgcgagtgccattcagcgtaccggtgcgccggtatcgaccatgattatcggcacgctgccggtcgtcatccccgtctttgctaacctgctctacagccagcgcgatggcaaactggcgtggtcaaaaatggccccggcgctggtatgcaccgccctggggctgatatgcgtcaatattgccgagctgcgccatgggcagggcgatgttgacctgtggcggtacggttctggcattctgctggcgttcatttccgtggcgtgctgggcatggtatgccctgcgcaacgcgcgctggctgcgtgagaacccggacaagcacccgatgatgtgggcgacggcgcaggcgctggtcacgctgcccgtatccgtcgtggggtatctcggcgcatgcctctggctgggccatcagcagccggacttcgcccagcccttcgggccaagaccgtgggtgttcattggcctgatggtagcgatcgcggtgctgtgctcatgggtgggcgcgctgtgctggaacattgccagccagaagctgccgacggtgatcttagggccgctgattgtcttcgaaaccctggccggactgctttataccttcctgatgcgccagagcgtgccgccgctgttcacagcctgcgggatcgtgctgctggtggtgggggtagtgatggcggtgagagcgaagccggaaaaaccgagggtcgttccggcgtcggaggtgtgatatttgccgggtggcggctccgccttacccggcctacaaggagccgtttcgtaggccgggtaagcgccagcgccacccggcatgatgttaaaacgtttcccagtttgcttcagacgccgccgcgacaggctgcgcttttggcacataggtttttaccggcgccgctttgaccgcctggttgcgggtaattttgaacaccgccaccgcttcgttcaggcgtgcagcctgatcttccagcgccgccgccgcggccgcagactcctccaccagtgaggcgttctgctgggtcacgcggtccatctcggctaccgcctggcccacctggtcgataccgcggctctgctcgtcagaggccgaggcaatttcgcccataatgtcggtgacgcgggtgaccgcattgacgatctctgccatcgtggccccggcttcgttaaccaactgcgagcccgcgttcacgcgttcgccggagtcatcgatcagcgctttgatctctttcgccgcctgagcgctgcgctgggcaagggtacgcacttcccctgccaccaccgcaaagccacggccctgctcgcctgcacgggccgcttccaccgccgcgttcagcgccagaatattcgtctggaaggcaatcccgtcgatcacgttggtaatttgcgcgattttgctggaactggtggcgatttcgtccatcgtccgcacgacgccttccaccacgttaccgcccttcttcgccgtggaggaggcatccagcgccagacgggaagcctgacgcgcgttatcggcgttctgcttcacggtcgccgtcagctgttccatgctggctgccgtctcttccagagacgcggcctgctgctcggtacgggaagagaggtcgttactgccagcggagatttcgcctgcaccggtgtaaatggtatctgcgccttcacgcaccacgcccacggtgttcgccagcgaagtttgcatctcctgcacgttacgcgccaggatggccatttcatttttaccgtcggcctgaatcggctgggtgagatcgcctgccgcaatggcgcgaatatggttgatcacctcttccagcggcagcagcagcacgcggcgcatcgcaatccagctggagataatcaccacgatcaccagcagcatgaccgcagagaggatccacaggatgcgtttgtaatcactttcgttatcctgaatgcctttatccgtgagcgcggcctgcgcttcacgccattcacgataaaccgtctgcatcgcattctgtttttgttcagcattctgcttgaacatatcttccagattgccctggctcagcagaacattcatttgcgtcagcgttgcagagtaaatgcggtactgctcctcgagttggttggtcaggttctcatccaggcctggcgtattcggcaaggcatagtatttatcgtaatgaacctgggcttcagtcagcagatttttcgccgtggtcaccagctcattcagctgaccgccgttaatttgcgaggccatgctgctttgcaggcgcagcatcccgcggttcagggtgacgcgcgcctggttcagactgatccacgcatcggtaaactccgccacgttcttgctggagagctgcgacacggtaaagttgtctttatcgttattcagggcgttgataaagataccggcggaaatcacttgcatgatgccgagcacaagcagcaccgaaatcagaagggtaatgacttttatacgtttaaacatgcgttgcctttgttatatgcaggtttgtctgacgtggatatatcggcaggtgcagcgggttgtttactgtttctccacctttaaaaagtttcgaaaccactttcctgaacccattctgagagttaaatcggatatttttttgtgatctgcatctcacttttacccgttcctctaaagggttatagcgtcgcttaaaagatgtatttaatatgcactttatattattgatgatgaggtaactgctatggcctttcgcgaccaacccctgggcgagctggcgctctccattcctcgcgcttctgcgctgtttcgcaaatacgatatggactactgctgcggcggtaagcaaaccctggcacgggcggccctacgcaaagagctgaacgttgaggtgattgaagccgagctggcgaagctggccgaacagcccgtcgacaaagactggcgaaccgcttcgctcgcggaaatcatcgaccacatcatcgtgcgttaccatgaccgtcaccgtgaacagctgcctgagctgatcctgcaggcgaccaaagtcgagcgcgtgcatgccgacaaaccttccgtaccgcgcggtctggcgaaatacctgaccctgctgcacgaagagctttccagccacatgatgaaagaagagcagatcctcttcccgatgattaaacagggaatgggaagccaggcgatggggcccatcagcgtgatggaaagcgagcatgatgacgcgggcgaactgctggaagtgatcaaacacaccacccacaacgtcacgccgccgccagaagcgtgcacaacgtggaaagcgatgtacaacggcattaacgagatgattgacgacctgatggaacacatcagccttgagaacaacgttctgttcccgcgggcattagcgggggaataaaaaagcccggtggcgctagcgcttaccgggcctgcaaggtcctcgaacgtaggccgggtaagcgtcagcgccacccggcaacatgcttaacgcatgccagccatccgtttcttaccgataaacatccagcccagccccagcgcgataaaccacagcggcgtgacgatcagcgcctgacgggtatcatcttccagcgtcagcagaaccagcacgaagacgaagaacgccatgcatacccagcacatcagcttgcccagcggcatcttgtagatcgatttttcatgcaggtgtgggcgttgtttgcggtacaccagataggaacagaggatgatggtccagacgaacataaacaggatcgctgagaccgtggtaatcatggtgaacgcgccaatcacgcttgggtttacgtagagcatcaccacgccgcccagcaggcacatgcaggagaaggtcagccctttcgcaggtaccgcacgcttagacagcttggcgaacgcgctcggtgccacgccttcctgcgccagaccaaacagcatacggctggttgagaacacgccgctgttcgcggaagacgccgctgaggtcagcaccacaaagttaatcaggctcgctgccgcaggcagccccaccagcacgaacagctcaacgaacgggctcttgcttggcaccaccgagctccacggcgtcacggacataatgatgatcagcgcgaagacgtagaacatgatgatacgcaccggaatggagttgatggcgcgcgggagagacttctccggatctttggtttccgcagcggtcgttccgacaagctcaatccctacaaacgcgaacaccgcaatctggaagccggcaaagaagccgctaatgcctttcgggaaccagcctccatcattccacagatgggtaaacgacgcctgaacgccggttggtgactggaagtgggtgagcaccatcaccaggcctactacgatgagcccaacgatggccacgattttgatcatcgcgaaccagaactccatctcaccgaacattttaacggtggcgaggttcaggctcagcagcagaacaataaccgccagcgaggccacccagtccgacagcccggggaaccagaactgcgcataggcggttatcgccacgacgtccgccataccggtcacgacccagcagaaccagtaggtccagccggtgaaatagcccgcccatggcccgagcaggtctgaagcgaagtcgctgaaggatttgtattcaaggttcgagagcagcagttcacccattgcacgcatcacgaagaacagcataaaaccgataatcatataaacgaatatgattgacggtccggcgagactgatggttttgcctgaccccataaacagcccggtaccgatggcacccccaatagcaatgagctgaatatgacggtttgtgagattgcgccgtagcgactgttcagacgacgcctcttcgtcggcgacgactttgacctgatctaccatgtgatattttcctgtttatgcctgtctgtgttgttaaggctcttctggcctttaaatacgtcaaaaaaatgacgttcccttgttagggctaatcgatattaggtaagaatcggcgggatgaatactatgatttagatattatgttaataatatgttgaaagtgagtgtcatatcactcatgcagcgcgaaacagctcacaaaaatacacgcaacagtttcttttgcaagataaaatattgattccgacttaactataggttttcacgctattttcccctccccaaccggggagaggaaataagaaaagtcgattacagaatttccagcagctcgacttcaaagaccagagtgctgaatggcgggatggacgcgccagcgccgcgctcgccgtaagccaggttgtgcgggatagtcagttcccatttggaaccgactggcatcagggtcagcgcttcgatccagcccgcgataacgccattcaccgggaactcagccggttcgccgcgcgcgacggagctgtcgaagacggtaccgtcgatcagcttaccggtgtagtgtacgcgaacgtggtcggtacgcgccgggattgcgccatcgccctgattgatcacgcggaactgcagaccagactcggtgctgttcacgccttcacgctcacggttctcttccagatatttcacaccttcggcggccatctcttcaaagcgcgcgcgacgcacggcgtcagcacgctcgtggatttcacgcagcgcacggtgcacaacgtcaaccggaacggcaggctgtttaccttccagcgcgtcagcgatacccgccaccagcgcttcaggtaacagaccttccaggccggattcgctcagctgctgtcctacctgcaagccgataccgtaacttgcctgcgcttcgatagtgtcaaaagtcggggtggtcatgggttttccttccatcacatttaaagtagcgggcagcatatcagccatgcccttatgggtaaaactttgtctgaagttaaggtgacaaaccgcgacgaaacagaaacaatagagagaaccaggattaatcccgaactgatgtcacggatgttgggtttactacgccgttcaggcagttagcaaactatacttcggggcacaggataaaaaatacgcggagcaggaggagtgccatgcccgggcgatttgaactgaaacctaccctggcgaaaatctggcaggcgccggacaattttcgcatcatggatccgctgcctcctctgcatcgcagagggatcatcattggtgcgctgatggtgattgtgggcttcctgcttccttccggtggcgatgatgttgatactgcccccgtcacccgcaatgctcagctggaccttcagtcgcaaacgcgaccgcagcctgacgcacagccgatgcagacgcagctcgttaccccgtctaacgatccgggtcaggtcgcgccggttgagccagagccgattcaggacgaacagccacaggaacaggccgccgccccgtctcagcctcagacccaacagcccaccggcattgagcaacagtggcgttcctatcgcgtagagccgggtaaaacgctggcgcagctgttccgtgaccacaacctgccgccgacagacgtgtatgccatggcaaaggtggaaggcgcgggtaaaccgctcagtaacctgcagaatggccagatggtgcaaattcgccagaatgccagcggggtggtgacagggttaacgattgataccggaaatggacaacaggtgctgtttacccgccagacagacggcagctttatcagggtacgttaagggcggggttctgtaaaaagcaaaacgccggcacaaggccggcgtttcaacgtgagcagagtaaaaaattactcagctacaacgttaacaaccagtttagcgaacacttcgctgtgaacctggaagtcaacttcgtgctcaccagtggtacgcagaacgccgttcggcagacgaacttcgctcttagccactttaacgcctgctgcagaaactgcatcagcgatatcgcgggtaccgatggaaccgaacagtttaccttcgtcgccagctttggacgcgatggtaacggtgcccagtgcgttgattgcttcagcgcgagcgttagcagccgccagaacgtcagccagtttggcttccagttcagcgcgacgtgcttcgaaaaactctacgtttttcttggtagctggaacagctttaccctgtggaaccaggaagttacgagcgtaacccgctttaacgtttacctgatcacccaggctgcccaggtttgctactttatcaagcagaataacttgcattaccttatcctcttaaagtcgtattaatggaccgtgcccgattactgatgacgatcagtgtacggcagcagggacaggtagcgagcgcgtttgatagcgcgagccagctgacgctgatattttgcacgagtaccggtgatacggcttgggacaatcttaccgctttcggtgatgtagtttttcagcgttgcgatatctttatagtcgatctcttgaacgccttccgcggtgaaacggcagaacttgcgacgacggaaataacgtgccatatggctagtctccagaatctatcaaatcaatctgctcggcatgcagaaccattttgctcaggccgttctttgccttgtggcaagagatgaacccctgaacgattactgcactaccgaccgttaaactgtgagtaatggcctggttttcgtgtccgctaataataacgggcatttggcaccacgcctgccggtgaaacccggcttcctcttgcacagaacgatgctcaagcacgaactggcaatgcggaattcctgatggactgacctttcgaaggggagccctgcatacgatgccggacaacgccagacggttggtcatcagaaattactcttcagaatccccagcatcagaatcatctgcggtttcgtttgcgaaatcatcgcgacgctcacggcgctcgtctttcgctttaaccatcggagatgcttcggtcactgcgtttttggtacgcataaccatgctgcggataacggcatcgttgaagcggaagttagtttccagctcatcgatcacttcctgcggcgcttcaacgttcatcagaacgtagtgtgctttgtgcagtttgttgatcggataagccagctgacggcggccccagtcttccagacggtggatcgtgcccgctgctgcagtgattgcaccagtgtagcgctcgatcatacccggaacctgttcgctctggtcaggatggaccataaaaacgatttcgtaatgacgcatcgaattgctccttacggattattcagcctcctgtctgggtcagccgaggcccggggaggcaaggaacgtgttaaaggtcggctgaaaaattgacgcgtcataatacttgcgcgcccctggaaactcaagctgattgcacaaataattcgcacaaagcgcgaagcgggtctaagtgggtgatttaaaattactcacatccgtaagcggtgtttttttgaacaactgcatcagaaatggtcacgcatccccgccggaggaatgattacactttaatcagagataaccgaaacagaagaaggagcatcccccctctcacagcacgcagtcgtggagcgcatatcatgaaaaaaatcgcattagccataatggcggcgcttttgctcagtgcaaacgcgatggcagccatcaagatagacagccgacaggccagaaacatggatgatgtgcacagcttaggcgtaatctatattaatcataatttcgccaccgaaagcgaagcagatcaggcactaaatgaagagaccgacgcccagggcgcaacctattaccacgtgatgttaatccgtgagcccggcagcaacggcaatatgcacgccagtgcagatatttaccgataacgccttaacgctagcaccaggaaagccaacaacgagaacatagccatagttgacgttgccccctgcccgggggctttttttgtgaatggctccggaataccaccggttacaactgtttttcggtattccagagcacttattcacttctgcccgtaataggcattcgggccatgcttgcgcatgaaatgcttgttcatcaggtaatcatcaatgccctgaagctgtgggttaataccgcgggcaatccacgccatacgtgccacttcctccatgacgaccgcattatggacggcgtcgtgggcatcttttccccaggcgaacgggccgtgctgatacaccacaatccccggcgtatgcagcggctcgcattctcccagcgtgtcgataatcacctttccggtgttgagctcgtactctccttccacttcatcctgcgttaatgcgcgcgtgcaggggatgtcgccaaagaagtagtccgcatgtgtcgtgcccagcgccggaatcgccagccccgcctgtgcccaggcggtcgcgtgcgtggagtgagtatgcaccacaccgccaagggacggataacgccgatacagcgccagatgggtcgccgtgtccgaagaaggacgccatttaccgtcaacaacgtttccttcaagatcgaccaccaccatatcgtcagccttcatggtgtcatacgccacaccgctcggcttaatcacgatcagcccctgctcgcgatcgatagcgctgacgttaccccaggtgaaggtgaccaggccatagcggggcagatccatgttggcttcaaagacctgctgtttaagcttaagcatgttcagcctccagtaatcccgcgcgcgccatacgctcgcgcacccattcccgcgcctttgctacttccgcagcagggttgtccgacgtttcgctccacatctcaatcaggtatggcccgcaatagcctgtctgcttgagcgtctcgaagcaccgttcgaaatccaccaccccggtgccgaacggtacgtttttaaacacgcctggacgggtatctttgacgtgcaccgccacgatatgccctatgcctgcctgcagctccatctgcacgtcgttatcccatgccgacaggttgccgatatcgggataaagctggaaccacgggttgttcagatagtgcgcgtagcccagcgccttactgatggagttcatcagcgggtaatccatgatctccattgccagcgtgacctgcgcacggctggccatctcaacgctctctttcagaccatcacggaaacgacggcgcgtttcattgttggcttcctgatagtaaacgtcataacccgccagctggatcacgcggatacccacgtcctgcgcaaagcggatggctttacgcatgatctccagcccctgcgcgcgcacggcatcatcttcgctgccgagcggaaaacgacgatgagcgctcaggcacatggacggcacgcgcacgcccgtttccgcgatggcgcttaccagtgccaggcgctgttcgcggctccagtcgaggcgagcaagacgctcgtccgtctcatccaccgacatttcgacaaaatcgaagtccagctgttttgcgagctgtaaccgctccagccagcactcccccgcagggagtgccttttcatagatgccaagcgggacctgttttgacaacatacccgctccttagccccaaagctgagcgattgagcgtttgaactgacgcgccgcttccaccggggacgccgcatcacgaatgctgcgaccggcaataaagacgtgaatcggaatgcccttgaacagcggcagatcttccagcgccagaccaccggtgacggtgactttaaagcccatatccgccagacgtttgatagcgctgatatccgcctcgccccacgccacacctgcggcctgggcatcacggctgcggtgatacaccacctgctgaatgcctgcttcacgccattcttgcgcctgctcccaggtccagaagccggtcagctcaatctgcacgtcgccgttaaactcttttgccacgtccagcgcgcctttggcggtgttgatatccgcacagcagatcacggtgacccagtcggcgttggcttcgaagcacatgcgggagaggattttgcctgcgtcggcgattttggcatccgccagcacgattttatgcggatagagcgctttcaggtcgcgaaccgcacgaacgccttcgcccacgcacagaatggtgcccacttcgatgatgtccacttcttccgcaatcaggcgggtggtttcgtaagcgtgagacagcgtttggttatccagcgcaacttgcaacatgggtaatgacatattcaattcctcttaaacggccgccgcagtggcgttatcaattaaatccagcacgtcctgcgcggtgcggcaggcgcgtaaacggtcaaaattggcttcgtcatcaaacagattgacgatctgcatgatgcccacctcctggtgggtattggcatcgacagccgccatagtgataaggatgtcgaccgggtcgttatcttcgtggttaaacatcagcggcgttttcaacgtcaccagcgcgaagccggttttcttgacgccctcttccgggcggccatgcggcatcgccaggcctggcgcaatcacaaagtaagggccatgctgcgctacgccatccagaatcgcctggtagtaacgcggctcgacaacgtcagccttaaccagcagatccacactcagcttcaccgcttcctgccaggtactggcttcggcctgtaaaaggatggagttattctctgccagcgaatcacgtagtttcatatggcgtccttacttcacgtcttgtgggaagtgttctttgatcacttccagcagttttggtccgaaatccgcaggcgacagcatgttgcgtacgcccaccacatatttattacccgacacactaatttcgccggcgatatgagtagaggcgatgatgatgtccgcgccgttcagctcacttttgtattcacccactgcgcagctgttcaccgtgtggtcgatgttggactgggttaaaaactggtccactttcatcttcatgatcatggagctgccttgcccattaccacacacagccaggatacgtacggtcataatcgaaactccttaatgagcagacacttctgctgtttgtttttccgcatcttcttcagctcgcagcgaacggccagcgaagaacatataagccagagcaatcaggatgatgatggccataaagatcagcccgatggaggcaaaaccctgcatcatcggcggtgccagaattgaccagtccgccatgcccatccaggcgctcataccggtgagcttgaccgcccacacgcagccaaagatttcaaccatgcccattaccaggcagatcttgagcgccgcgcgccagccaccgaagtggttagcgaatacgccgatggtggcgttggagaagaacatcgggataaagcccggaataatcaggattgaggagccgcagccgaccaggatacccaccgcaatcagctggccgatggtgccccacataaatccccagaccaccgcgtttggcgcgaagctatagatagcggcacagtcgatggccagtaccgcgccaggaatcaggcgctgagagataccgttgaaagcttcagacagttcggcgacgaacatacgcacgccctgagtaatgatgaaaatagccacggcgaaagagaaaccggtctgcaggatgtaaaccgtccagtgggttttccccgccatcgcctgcaccacatcaataccgaaggagagcagaatggcgccgaagaagagggtcatcacaatcgcggtcgacacgatgttgtcatggaagatattcagccagccaggcagcttaaggtcttcaacactctcttcttttttacccaggtacggcgcaactttgtaagcaatccaggcagcaaactgttgctggtgaccgatggaaaaaccgcaaccgtcggtcactatctgggttggcttgtacatcatgttggaggtgataccccagtagagcgagaccagcaccgcggtgcagataatcgtggtccacattgggtaaccgaagatatagagagaaaccgcaatcagccccgcctgctggaacataatgtgcccggtgagcatgatggtgcgaataccggtaatgcggcgcagcagaacatagataatgttcagcgccagcgcgagcagaacggcgtaacctacccagctataggcatcacccatacgatcgatggtcgccatcattgaggcgtaggtatcagagatagccccattaatgccatacacttccgacattttggcaacgactggcttaaacgtgctggtcagtatgcccgaccccgcctgcaacagcatgaaaccgataatggttttgatggtgcctttaataatcacgctgacgcttttacgcagcaggatatatcccaggcacgtcacgatacccagcaacagcggggcgttggtcattacctgattaaagaaaacggtaaagacgttgtagaggatctccataactctctccagaaatgagaacacgaggggcaatccctgtgcggttggtgccatcactctattaatcacaaataatcaccacaagattgaatttgattatttgtgacgcatcacgcaatttatttcccttcagttagtaatgattttcactaccgcacaaatgaaataaattagtccttataattcatgaaattaatgtttattacgcgataatctaacaagtaacaagcagagagtctgtgacgttgagcagataaaattccgcattttcgctattgcaaagcgcgtaaaatggtgccagcattaatcacaacgaatcacaatgtgattacttttgattaaaaccaggagtcaaaacgatgagtaaagtgaacaccatcacccgtgaatcatggattctgagcacctttccggagtggggtagctggctgaacgaagaaatcgagcaggaacaggttgctcctggcacgtttgcaatgtggtggctgggctgcaccgggatctggctgaaatcagaaggtggcgccaatatctgcgtcgatttctggtgcggcaccggcaaacagagccacggtaacccgctgatgaaaaaaggccaccagatgcagcgtatggccggcgttgaaaaactccagccgaacctgcgtactacaccgtttgtgcttgatccttttgccattcgtcagatcgatgccgtgctctctacccacgatcacaacgaccatattgatgtaaacgtggcggcagcggtgatgcaaaactgcgcggacgatgtgccgtttatcgggccgcagacctgcgtggatctctggattggctggggtgtgccgaaagagcgctgcatcgtgatgaaaccgggcgacgtggtgaaaatcaaagacattgaaatccatgctcttgatgcctttgaccgtaccgctctgattacgctgccggccgatcaaaaagcggcaggtgtactgccaaacggcatggacgagcgcgcggtgaactacctgttcaaaacgccgggcggctccctgtatcacagcggtgactcccactactccaactactacgctaagcacggtaacgagcatcagattgacgtggctctgggctcctacggcgagaacccgcgcggtattacggataaaatgaccagcgccgacatgctgcgcatggcggaagcgctgaacaccaaagtcgttattccgttccaccacgatatctggtcaaacttccaggccgatccgcaggaaattcgcgtgttgtgggagatgaaaaaagaccgcctgaagtacggcttcaagccatttatctggcaggtaggcggcaagttcacctggccgctggacaaagacaatcttgagtaccactacccgcgtggtttcgatgattgcttcaccattgagcctgacctgccgtttaagtccttcctctgattccgaggccacatcgccagacttgtgtctggcgatttcatatttattttagtaatttcacgctatttcaaatatcatcttttcaaatcaattcttatcggaatagctcatgacggaagcgcaacggcatcaaattttactggaactcctggcgcaaacagggtttatcaccgtcgagaaagtgatcgaacgtttagggatttcccctgccaccgcgcggcgagacattaacaagctggatgaaagcggcaagctgaaaaaagttcgcaacggtgcggaagccattagccagcagcgcccccgctggacgccgatgaacattcatcaggcgcagaatcacgatgaaaaagtgcggatcgccagagccgcgtcgcagctggtgaatcccggtgagagcgtcgttatcaactgcggctctacggcgtttttgctgggccgcgagatgtgcggcaagccggtgcaaatcatcacgaactacttaccgctcgccaactatctcatcgttcaggagcatgagagcgtggtgatcatgggtggtcagtacaataaaagtcagtcgattacgcttagcccacaggacagcgaaaacagtctctacgccggacactggatgtttaccagcggcaaaggcctgaccgctgaaggtttgtataaaaccgatatgctgaccgcgatggcggaacaaaacatgctcaacgtggtaggcaaactcgtggtgctggtcgacagcagtaaagtcggtgaacgcgcaggcatgctgttcagccgcgcagaacagatcgatctggtgatcaccggcaaaggggctaaccccgagatcctccagaagctggaagatcagggagtaaaagtgctgcgcgtttaaaggtgctggcggaaaaacgctaccgtggcgtccagcgccgctggcgtaatgcggtggcgaacgcctgattcccacaaacaggtcagattaccgtccagcccttccttctttaacgcctgctgcaggcggaaggtaccgtcaggtggcaccacatcatccgcatcaccgtgccacagcaaaagcgggcgatctgcgaggcgcggcaatgcccgggttacttcccactcttccagcctcgcggtgatttccgctaaatcctgagggggaaaaagggtcttcgccagcgaggtaaaataacccgagcccatcagacaggcgaccgacttcacttctggatggtgcgtcatgatccccagggctgtcataccgcccatcgacgccccggccacggccagacgattctcggccaccagccctgcctcataaagcgcatcgcgcaatccggcaaactcggtcagactcccgtgcagtatgtgccagaactgcccaaggcgcgcctgctcattacccataaatcgagcgccgtggccaggcgcatccggaatcaccacgcgaaaacctgcctgcgccagcgcgaccgcaaagtaactgtaaaccagcttcgatgaggtaaatccatgataaaaaaccacaacaggcagcggtttatcacgtttacccgcaggcatagcgtgtaaaatttcatggtcgccgagatggcgtatttcaatttcaatcattgtcgaccctgcacgaatggatgattcataatgttgagaactggattacggtttcaggctattttcattcgaaaattacgtcccagctaacacttcgggaacattcccccaaaactaaattcacagacaactacactatggctatcaggaaacgagatatggttatgcacaggtttgctgctttattgctggtgtttctgctcagcggctgtagcgcactgcagggaacaccgcaacccgctcccccggttgccgatcatccgcaggagattcgtcgtaatcagacggaaggattacagcgaatgggcaccgtctccgcgctggttcgcggttcgccggatgacgcagaagaggcaataaaggcacaagccgtcgccgccaaagcagattattacgtcattatcatgatcgacgaaaccatcataacggggcagtggtattcacaggccattttgtaccgaaaataatggtttacctttgaacgacatttacactgctttgcgtccatagacattttcctgtccacaataaactccatgccagcgacaagggatgggagtttattcgcgaaggattgcccggcggataccggaaatatgtgaaatggagctgacgatgaaacgaactcttgctttgacctctctgttgctctccgcaggcctggtgagcaccaccgcgcagtcagcagaattcgccagtgctgactgtgtaactggcctgaatgaaattggccagatctccgtgaataatatctcggggagcccgcaagacgttgaacgcgtcgtggcattaaaggccgatgagcagggtgcttcctggtatcgcatcatccagatgcaggaagataaccatatcgaccactggcgggtacaggccattctctacgtgtaaactccctcctgataaaagccacttatttttagtggcttttcgcttttgcaaattttttatcttatgaaaaaccaatcaataacaacaaaataacattttgttacactaattcagtaaacgtaatctccgctctgccgttgaagaaccatacctattcaatgatgagcaatttatgatcaacgtttttcgccgtgcaggcctgggggcgaagctgtcgctgcttacgggcgtcagtgtcgccacgctgtttctgcttttcacttttctgctcagtcaaaaagccagccagcagcttgaagcccttgcggtagaagacctgctcaatcagtccaccggcatggtcgacatggtgcagatgtttaacaccagcctgagtgaagaggttgagagttatacccggctgtttaccacttttttaccgcagccactgaatattgatacttcccaggctcagacgattaacggactcagcgtcccgcttctgaaaggcggtgacaccggactgcatcaaaacaacaccctgtctgacgagttcctgaaccgtgcgggagccatttcgacactgtttgtacgcagcggtaacgactttgttcgcgtagccacctccctgcgcaaagagaatggcgagcgggcgatgggcaccgtgctggataccgccagcccggcctttgccgccgtcaacagaggggaagtctaccgcggactggcgctgctgtttggcaaacgctatatcacccagtatcagccggttaaaaacgccgaaggacaggtcattgcgatcgtctttgttggcgtggacattacgcactcctggaacgtcatgcgcgagaaaatcctcacccgccgcctgggcgagagcggtcacttcttcgtgctggatcgcagcaacggcaaaacgcgcgggcaatacctgttccatgccggtgaagaggggcagttgccgaagtgggacgacgcgacgcagcagcagcttctgggtgacaagcccggcaccctggaacgcgtaagcgacgacggccgcacgcttaaaatggcctataccccgctgccaggctggaactggactatcgtgggcgaagtggataaatcggtgctgctctcaagcgttaacgccatgcgcgatcgcttcctgctggccggcgtggtcttatctatcctgtttgctggtctgttcgtggtccttattcgctgtgtgctgacccgaccgctgagcaatgtgatccatcttgcccggcaatatgctgcaggggatctccgttccagcctgcccgtgacgcgtcaggacgaagtcggccagctgatcgacgccattaacggcatcggcggcggcctgcaaaaaattgttctgcaggttcgcgaggccgcaggcgagatccatttgggcactaacgcgctggcgtccgataccggcgagatttctgagcagatcaacaagcaggccagcagcgtggaagagacctccgccagcatggagcagctggccgccaccgtacagcaaaatgccgccaacatggagcaaacgcagcagctggtgggtgaaacctccctcgcggtccatcagggcggtgagacggtcacccacgccgtgtcgaccatggacgacattcgcgaggcgtcaaaacgcatcgaagacatcacgcgcgtgattgagtccatcgctttccagaccaatatcctggcgctgaatgcggcagtggaagcggcccgcgcgggcgagcatgggaaagggtttgcggtggttgcgcaggaagttcgcgccctggccggacgcagcgctaacgcggtgaaggagattgaacagctgattggcgatacgctcaggaaagtgagtgagggccatgcgctgtctgaaaagacgcgcctggcgatggatgacatcatcattcatatcgataacatcagccagttggtcaccgagattaaccatgcctcacgcgagcagtcggcagggattggccaggtgaatctcgccatgacccacattggcgaagcgtcgcatattaatgcggatcgtatctcacgcagcgaacaaaccgctcaaacgctgcgcgagaaagggtcacatctggctcaactggtgagtctgttccagctaaaagactaacctactctgcccgtcgcacgcagcagcaggtcattttgcacctgctcgctcatcagcgtaccgccacgggtatccagcatcatgcggcaccacgcctgcgccaccgggggcgatgcgtgccgcagcatttcgcttccggcacccagcaggaaaagctgctgcgcaatttcccgcccctgcgcctcctacggtttacgcagtttttgctgaagctgtcgccagctgcggtcgaagtgtctgtcctgcccttttacctgtgcaaactcatcggcaagcagatcgtgaatacccggctgcttcgccagcacgcgcagcacgtccaggcacatgatattgccggacccttcccagatgctgttcaccggcatctcgcgatacaggcggggaagttcgctctcctcgcagtacccgactccgcccagcacctccatcgcttccgccacaaacgggatgcccgctttgcacacgctaaatttcgcggcgggggtaaacagccgcgcccatgccgcttcctggggatccgcgcgtttatcccacgcccgggccaggcgaaacagcagcgccgtttgcccctccagcaccagcgccatccgacttaacacctcacgcatgagcggctgatcgataagatttttgccgaaggtctgacgctgatgcgcgtggtacagcgccacggacagcgcacgacgcatcagtccgtggctgcccagcgcgcagtcaaagcgcgtcaggccgcccattttgaggatctgccgtaccccttcgccctcttcccccagcagccagccggaggcatcaagaaactctacctcgctgctggcgttggagcggttcccgagcttgtccttaaggcgctccagccggacggcgttgcgctgtccgtcaggtaaaaagcgcggcacaaaaaagcaggacaacccgcccttcgcctgtgccagcaccagatgcgcatcgctttgcgggacggagaaaaaccatttatggcccaccagccggtagctgccgtcgctgcatttttccgctttggtggtgttgctcagcacgtccgagccgccctgtttttccgtcatccccataccgatcagcaggccgcgtttttgcgcgccaggcgccagatgaggatcgtagcgatcgctgagcagaggcgtcagccagtcgtgaaataatttagggagcgcctgctgcaggagcggtgtcgcggcaaacgtcatggtgacgggacaaagcgtgcctgcctcaacctgagcatgaagcacaaagcgtgcggcccgggcgacaaaagcccctttacgcgcctcctcttcccatgccaggttatgtacccgattggcacacagcccctgcataagcaggtgccatgccgggtgaaagcgaacgtcatccagtcgctctccggtggcgtcatagcgaagcaactccggcggattcacgttcgccagcctgcccagctccagcgactctgcggtacctaactgctgcccgatgctggcgagcagttcgatatcccactcggcaccctcacgcgagactgcgtcacgcagcgcgcagtccgagagaaaaaggttgctgttagagagtggtgcaggttgattgaaaacggtatgagtctgccagtgcatactgtctccctccttcagtggcaatgacgataagtatggacagaccgcgcacacgctgcatgggaggggagtcacacgttcacgatcccgctgatatcattcgtgaaatagctcacagaacataagaataaactatttcatgacttcgcttttgttgaataatttattctctccccctttcagtgaggaaagttatgcaaccggatgcgcacaagcgagcattaattgccggctccattggtaactttatcgagtggtatgagtttgcggtctacggttttctggcgaccgtcattgcgaagaacttctttcagcttgaaggggaagcggggcttaccagcctgatcctcacctacgcctcatttgccatcgccttcttcttccgcccgctgggggcggtggtgtttggccgcatcggcgaccggattggccgtaagccgacgctaatcattgtgctggtgctgatgacgctcgctaccgccgccatcggcattgtgccggtctacgccagcatcgggattgccgccccgctcattattacactgcttcgcatcctgcagggactgttcgcgggcggcgagtacggcggtgcggtctcgctgatgacggagttcgccccgcgaggcaagcgcgggctctatggtgcctggcagtcctttaccgtggcgctggggctgttagcgggtgccggcatcgtggcgctgctctccgcctttctcacgcctgaagccctgcacgactggggctggcgcattcctttcttcctggcgctgcccatgggcgctgttgcgctgtggcttcgcgtcagcatggaggagacacccagctttgtgcagcagcaggacaaaccggccgtcgctcaggcggacattgccgccacgctccgggccatcgtgatggggattggccgcgtgatggtctggtctgcggcggggtacacctacctggtgattatgccgacctatctgcagtcggcgctgcacaccgggtttaatcaggcgctgttgatcgcagtgatttcgaacgttgggtttgcgctgacgatcattccgtcggggatcctgagcgataggatcgggcgtcgcacggtgatgattatcgccaccgcgctgctgctgatcctcgccctgccgctgctgaaacttctgcaggcggagtccagcacgctggcggtgaaagcgatagtagtattgattgcgggcggtctggtgggcatgctggcggggccgggcccggcgatgctctctgagatgttcccgacccgcgtgcgctatacggggctggggctggcctattcgttatcgaacgcgattttctcgggatgcgcagggttaatcataaccgggctgattaagcagacgggcaatctggatattccggcgtactacgtgatggcgacggcagtggtgagtattttcgcgctgatgacgctgaggaaggatgaccatttgcggtcactggaggaatgaggttaatgcccggtggcgctacgcttaccgggcctacggtaccgtgcctttgtaggccgggtaaggcgaagccgccacccggcataacaggctacccgcgctgacgcaccgcttcaaacaggcagatacccgttgcaacggaaacgttcagagacgacacgctgcccgccatcgggatgctgatcagctcgtcgcagtgctcgcgcgtcaggcgacgcataccttcaccttccgcccccatcaccagcgccagacggccggtcattttgctctgatacagggtatgatccgcttcaccggcagtaccgacgatccagatgttctcttcctgcagcatacgcatggtgcgcgccaggttggtcacgcggatcagcggaacgttttccgccgcgccgcaggccactttcttcgccgtcgcgttcagctgcgcggagcgatctttcggcacgatcaccgcatgcacgcccgccgcatccgcgctgcgcagacacgcgccgaggttgtgcggatcggtaacgccatcgaggatcaggaagaacggattctcgagctcagcgatcagatccggcagatcgttttcctgatactgacggcccggcttcacgcgggcaatgatcccctggtgaaccgcgccttcacttttctcatccaggaactggcggttagccagctggatcaccacgccctgcgcttccagggcgtggatcagcggcatcagacgtttgtcttcacgccctttcagaataaacacttcctgaaaacgctccggtgcgcgctcgagaagggcctgcaccgcgtggatgccgtaaatcatttcactcattgatggttctcgtaataagtatttcccctctcccggttggggagagggtcagggtgaggggaggatttactccgcctgctttttcttagccgcgcgcttcgctttggtggcggccgctattttctgcgtcttcgcggaaggtttcttcgcggcacgggcttctttcttcgccgccttcggcttctgcttcttctcgccgcggaacgcactgtccggctcgaagttcaccttcttaccggcctgacggcgcttgccgctcgttttgccgtttccgccttttttcgctctttcgcgatcggttttaccgacgttacgcggcgcgcgctcgctggagatcaggctgaagtcgattttacggtcgtccatgttcacggcctcaaccttcacttccacacggtcgcccaggcggtaggtctggccgccagattcgccgatcagacgctggccgacctggtcgaagcggtagtaatcgttatccaggctggagacgtgcaccagaccgtcgataaacagctcgtccagacgaacgaagaagccaaagccggtcacgctggcaatcacgcctttgaagacgttaccgacctggtccagcataaagtcacatttcagccagtccgccacgtcgcgggtagcttcatcggcacggcgttcggtcatggagcagtgctgacccagctgcagcatctcttccatcgaatagtggtagccaccggtttcggtggtgttccctttatggccctgctcctgcgccagcagatacttgatcgcacggtgcagagagaggtcaggataacgacggatcggcgacgtaaagtgggcgtaagactgcagcgccaggccgaagtgaccgcggttttccggatcgtaaatcgcctgcttcatcgagcgcagcagcattgtctgcagcatttctgcatcaggacgatcgctaatggattccagcagctcggcgtaatcgcgcggctctggcttattgccgcccggcagctccaggcccagttcagccagcacggagcggaacgcggtgatggcttccgtcgacggtttatcgtgaatacggaacagcgcaggctctttggctttctcaacgaagcgtgccgccgagatgttcgccaggatcatacactcttcaatcagcttgtgcgcatcgttacgctgggtctgctcgatgcgctcaatgcggcgctcggcgttgaagataaatttcgcctcttcgctctcaaaggagatcccgccgcgctcttcgcgcgcctgatccagcgttttgtagaggttatgcagctcttcgatgtgtttgaccagcggcgcgtactgttcgcgcagatcctggtcgccctgcagcatatgccagaccttggtgtaggtcagacgcgcgtgcgagctcatcaccgcttcgtagaatttatagccagttaagcgccctttgttggagatggtcatctcgcaaaccatacagaggcggtcaacctgcgggttcagggaacacaggccgttagacagcacttccggcagcatcggtacaacctgcgacgggaagtagaccgaggtaccacggctgcgcgcttcgttatccagcggagtatgcggacgaacgtagtagcttacgtctgcaatcgctacccacagacgccagccgccaccgcgttttttctcgcagtagacggcgtcatcgaagtcacgggcgtcttcaccgtcgatcgtaaccagcggcagggagcggagatccacgcggcccactttggattcttccggcacttcttcacgcaggctttcgatctgctcttcaaccgctttcggccagatgtatggaatttcgtgggtgcgcagcgccatatcaacggccatgccggtgcccatattatcgcccagcacttcgacgattttacctaccgctttggtgcgacgggttgggcgctgggtgagttccaccacaaccacaaagcccatgcgggcgcccatcacctcttcaggtgggatcagaatgtcgaagctcagacggctgtcgtccggcaccacgaagcccacgcccgcgtcggtaaagtagcggccaacaatctggctggtttttggcaccaggacgcgcacgacgcgcgcttctcggcgacctttacggtcagcgcccagcggctgcgccagaatttggtcgccgtggatgcacattttcatctgttcagatgagagatacagatcgtctttacggccttccacgcgcaggaagccgaagccatcgcggtgaccaatgacggtccctttcagcagatcgaggcgttctggcagcgcgtagcactggcggcgggtaaagaccagctgcccgtcacgctccatcgcgcgcaggcggcggcgaagggcttcaatttgctcttcaccttcaatgtttaattcaacagcaagttcttcacgattggcgggtttttcgcgttttgttaagtgttcaatgatgaactcgcggctggggataggattcgcgtatttttcggcttcgcgttcctggaaaggatcgtgtgacatgtcggttcctccgttgtcagctccggtggaaattttcttcattccaccagcaataatttataaagcggttgattctcttcaaccaaatcggccagcgtgtagttatccagctccttgagaaaactttgcacggccttagaaagcgcctttttcaggcggcaggcgggcgtgatgtggcagaactcgctgctgcagttcaccagagacagcggctcaagttcacgtaccacatcgccaacacgaatactctgtgccggtttaccgagacggatcccaccattcttcccgcggacggcagcaacgtatccggcacgactaagttgattgattattttgaccatatgattacgggatacgccgtagacctctgtgacttcagagatactggtcattttcccatcgggtaacgacgccatgtagatcagcgcgcgtaagccgtaatcggtgaaacttgttaactgcacatcaacctcaggaaaaagggaaatcgcggacaaaccgcagagatattcattaatgatgataaaccagccagatagttagcggctaatttatttgacagacggggcgaaaaagcggagatccaggagcggtcgccggatggcgctacgcttatccggcctacgggtctccccgcaggccagcagtcacgaagattatgcgtcgaacgggtcgcgcaggatcatcgtttcagtacgatccggaccggtagaaataatatcgatcggcacttcggtcagttcttcaatacgcttgatgtaatccagcgccgcctgcggcaggccgctacgctctttcacaccgaaagtggtctcagaccagcccggcatggtttcgtagattggctcaatgccttcccagtcgtcagcagccagcggcgtggtggtcacttcgcggccatcaggcatacggtagcctacgcagattttcacttctttcaggccgtccagtacgtccagcttggtcaggcagaagccagacagggagttgatctgcactgcacgacgcacggcaaccgcatccagccagccggtacggcgacgacgaccggtggtcgcgccaaactcgttaccctgcttgcacaggaactcgccggtttcatcaaacagttcggtcgggaatggacctgcacccacgcgagtggagtacgctttgatgatgcccagaacgtaatccacataacgtggacccaggccagagccggtcgccacgccacccgcggtggtgttggaagaggttacgtacggataggtaccgtggtcgatgtccagcagcgtaccctgcgcaccttcgaacatgacgaaatcgccacgcttgcgcgcctggtccagcagatcggacacatcaacaaccataccggtcagaatgtctgcaatcgccatgacgtcatccagcactttctggtagtcaacagcgtcagctttgtagaagttcaccagctggaagttgtgatattccatcacttctttcagtttttcagcgaaggttgctttgtcgaagaggtcacccacgcgcagaccgcgacgagccactttatcttcgtaagccggaccgataccacgaccggtggtgccgatcgctttcgcgccacgcgctttttcacgcgcaacgtccagcgccacgtgataatccaggatcagcgggcaggcttcggagagcagcagacgctcacgaacagggataccacggtcttccagacctttcatctctttcatcagcgccgctggagacagcacaacgccgttaccgatgatgctggtgacgttttcgcgaagaatgcctgatggaataagatggaggacggttttttcaccgttgattacgagagtatggcctgcgttgtgaccgccctggtagcgcacaacatatttagcccgttcagtcagaagatcaacaatcttccctttaccttcgtcaccccattgggtgcccagtacgacgacgttgttacccatttttttcaaaatcaccgtttgcttaaaaatggattctaccatcgctttttcagatatacagcactttttgacctcagaatatcccaaatccgaccactttttgatcagccaatcgttttcctcaacatgtagtagatcacgatgcccgcaaccacaagaccgccgccaaaacgacgtaaaatattatccggcagttggctcatggtggcgatcattcgacgccaggcgcgtggatagagcatcggtcccagaccttccagcaccaggaccagggccagcgcgagccagatcgttgaattcatttttgttccttataaaagaaaaccaccgctccgtggggagcggtggtttgaatactcaaacgagcctgagtttatcgcgttgcgttagtcggcgtcttcatataacggaagaaatcgctgtccgggctgagcaccatcacatcctggttgctctggaagctattctcgtaagcacgcaggctacggataaaggcatagaagtcaggatcctgactgaaggcatcggcaaacagcttcgccgcctcggcatcaccttcaccgcgcaggatgcggccctgacgctcagattccgccagcgttttggccacttcgtagtccgcagcagcacgcagcttctccgcctcttcctggccctgtgaacggtgacgacgggcgaccgcttcacgctcagcgcgcatacggttgtaaatcgcctcggacacttccaccggcaggttgatctgcttgatacgcacgtctaccacttcaatacccagcgcagccatactgttcgggttgatcaccggcactttaccgttggtttcagcctgaacgcgttcagccgctttggcaatcgcatcatctgctgccggcgttgaaacttcatcttccgtgcccgctgtgccggagttcagcgcatcgcgaacttccagggtcagacggccacgggagtctgtcacgatgtctttcacatccagacgaccaatctcagaacgcagacggtcagagaacttacgtttcagcagcacttctgcctgagaaacgtcaccgccgcccgttgccaggaagtaacggctgaaatcgctgatgcgccatttgatataggaatcaacgatcaggtctttcttctctttagtcacgaaacggtcggcctggttatccatggtctggatacgcgcatcaagcgttttcactgactgaatgaacggcaccttgaagtgcagacccggctcgtagatcaccgggcgtttgtcgccatcacgcacgacgctgctgaactggaacttgatcccacgctcgccctctttcaccacaaagatcgaggtataaagcacgaccagtacgatgacgatgatcgcaataactgacttacgcatccttattccccctgacgctggtagtcgttacgctgcgcgttagcacggcgttggtccataatgtcaccatcgctcgaagaagacgtggttgttgcgcttgtgctaccggatgacgcaggtggcagacgcagcaggttgttcgcaccgctgttgtcttttgctgccgatgcagaactgcctttcagcatctgatccagcggcagcaccatcaggtttccgcctttactgtcgttaaccaacactttgcgggtgtggctcagcactttttccatggtctcgatatagagacgctcacgggtaatttccggcgccgctttatattccggcaggatcttcgcgaagcgagccacttcaccctgtgcttccaggatggtctgggtcttatacgcacgcgcttcttccagaatacgctgcgcctgaccattagcacgtggctgaacttcgttggtgtaggcttctgcttcacggatgtactgctgttcgttttcacgtgcagcaatcgcatcgtcaaaggccgctttcacctcttccggcggacgtgcagcctggaagttgacgtccagcagggtaatccccatgttgtatggacgaatggtctcttccagctcacgctgggtatcgctacggataacggtacgaccttcggtcaggatacggtccatggtgtatttaccgatcaccccgcgcagggcgctgtcggtcgcctggcgcaggctgtcatcagcgctggtcacgctaaacagataacgctcaggatcggtcacgcggtactgcacgttcatctcaacgcgcaccacgttttcgtcagacgtcagcatcacaccagacgccgccagttcacggaccgattccacgttgaccgcggtcacgtcgtcaatgaaggtcggtttccagttcaggcccggctcaaccagatggctgaacttgccaaaacgcgtaacgacaccgcgttccgcttctttaatggtgtagaacccggtagcagcccagatgattaccactgcagcggcaacaataccgactacgcggccacccatttgcgggcgcggcccctgggtggaatttccacctgagccagaacctttacctccgccaagaccaccaagcttcttgctcagcttgcggaagatatcatccagatccggcggcccctgctcgcgaccacctttgttgccatttcccccagagttgccgccttgattattgctgcttccccacgggtcgcggtcctgtccgttattaccgggctgattccacgccatgtatatgctccatatttgttatgcaagggcgaattattcaggcatcccctttctgatcagacgatatagtcgaccagcgcaggttcttgtttacagaggcgacgccagtcaacgatcggcatacgcacctgcatccccacgctgccgtcatcctccatccactctttttctatcgcctgaagctgataaaaccggctgcgcagcctgccttcctgtggcggcagtcgcagcgtgtgctgagctacctcaccggaaagacgttctgtcaaagcctggaaaagcagtggcacaccaagaccggtctgggcagaaagccagacccgaatcggtttgttctcttcatctctgtcgatacgcggttcgaaatcgtccagcatatcgatcttgttcatcaccaacagcgttgggatttcgtgggcgtcgatctcttcgagcaccacgttcaccgcgtcgatgttctcctgcacgcgcacgtctgccgcatcaatcacgtgcagcagcagggtcgcctgtcgcgtctcctgcaaggtggccttgaacgccgccaccaggtcatgcggcaggtgacggataaaccctacggtatccgccagcaccgtttcaccgacgtctgcaacgtcaatacggcgcagcgtcgggtccagggtcgcaaacagctggtctgcggcataaacctgggcctcggttatctggttaaacagggtggatttaccggcgttggtataccccaccagcgacaccgtcgggatgtcggctttggtgcgtgcccgacgcccctgctcacgctgtttctcgactctttccagacgcgagaggatctgggtaattcggccacgcagcaaacgacggtcggtttcgagctgggtttcacccgggccgcgcaaaccaatcccgcctttttgtctttcaaggtgggtccagccacgcaccagacgcgttgccagatgacgcagctgcgccagctcaacctgcagtttcccttcgtgggtacgtgcacgctgagcaaaaatgtctaaaatcaatcccgtgcgatcgataacacggcattcgcagagagcttccaggttgcgctcctgggctggagacagcgcatgatcaaacaacacgactgacgcgccggttgcttttacggcatccgcaatttcgactgctttaccttcaccaacaaaatactttgggtgcggcgctttacggctaccggtaatcacctgcattgcttcgacaccggcggaagagaccagagattcaaactcctggaggtcttccatatctttgtcttgcgaaaaatagatgtgtaccagcaccgcctgctcaccggcatcataacggtcaaacaagcgtaaacctctctaaaaagatcagcggggaacgcaggatccctggctccccgtgtggataacagtgcgaaaccttattcggtctcgtcgctgtcctgcgctggcgttgaagaaccctgcgcgttgctgccatgatggtagttactacctgtgccgccgccagcgttattgctgtgatgagataccggacgggacggaacaacagtagaaatagcgtgcttatagaccatctgactgaccgtgtttttcaacagaatcacgaactgatcgaaagactcaatctgaccttgcagcttaataccattcaccaaataaatagaaactggaacacgttcccgacgcaatgcgttcaggaacggatcttgtaaagattgccccttagccattctatcttttccttatatgcttgttttgtacttagaaccttgcgattctgaaaaattgcgcacgatacgcctcaattgtacacattcagtgagcgatatcaccaacaacctcaatcacgtcgcttaacgcctgttgtggtttttcactgtctaaccagtgaaccccttcccaaccgcgcaaccaggtgatctggcgcttcgctaactgtctcgtggcgcaaacacctcgataaaccatttcatcgtatgaaatctcaccttcaaggtacgaccacatctggcggtatcccacacaacgaatggaaggcatgtccgtatgcaaatctccacgggcaaatagcgcccgcacttctgcttcaaaatctgaagctaacatctgatgaaaacgctgctcaattcgctgatggagcagttcacggctcgccggggcgatggcgaactgatgcacctgatacggcagagcgtctcctgacgtttgcgtcagttccgttaaagttttacccgaaatgaaaaaaacttccagtgcccgggaaagcctttgcggatcatttggatggatccgcgctgcggcaaccgggtcaatctccgccagttgctgatgcaaaacgtcccacccctgctctgccgcctgctgctcaattttcgctcttacttccgggtccgcggatggcagaggtgataacccctccagcagcgccttgaagtagagcatggttccgccaaccaacagcggtatacgccccgccgccgttatctcggccatctcggctaaggcatcccggcgaaaatccgctgcggagtaagcctgagccgggtcgaggatatccagcaaacggtgcggtgccgcgcgcagttcttctgcgtcaggcttcgccgtgccgatgtccatccctcggtagatgagggcggagtcgacgctaatcaactctacaggcaaaactttacgcaactcaatggcaagcgccgttttgccggaggccgttgggcccattaaaaaaattgccttaggcaggctcgccttacttacgtcaatcatgtttcagggcgttcatcgccgtttttaaatcaacaggttgtaataacccacccggcggcgctttcaccagatgcggacagaggcgttcaacctccgccagcacgctgatggcctgtgccatgctccacggcgcgtgttcgctggccagatggcgggcgatccactgcgcggtgttagcggcatcaaacgatgtttgctgcgccaggtagcctatcagttcaggaatcaagttttgtaaattttgttggcgtaagggtaaaggcactgcacgaattgtcacatgttgtggttcgagcacaatttcaatacccatttgcgccagctgtgcttcggcacgctgcaatatccttgtttcatcaggggatattttcaggcgaaccggaattaacagcggctgcgcacaggcggcattttcgcccggcgtgagctgcacctgtttaagccagcgttcggcaaccggcagtgccagaagcatcaatttgccgtcacgttccagcagtgccatatccggcgcgataatcgtcagcacccggccaaaactctggctatggccgtccagagaaggctgaggtgccggaataggttctttacgctctacgactggcgtctccagcagtttgcggtacaacgcgccctgctgcttttgatagccaggctgggcattcgggtagttggcacccgttggacgcggagcggcccctgcggaggaaaagcgcggcgcttccggttcacgcgcaacggcgggctccgcaaaatggttgcggcccgcagcgacacggttttcaggaattgggcgcggcgcaggttctgcgtgttccagcggcaacggcgtttcaacctgctgctgcagcacgctcagcacgccctgatagataaaatcatgcaccagtcgcgactggtggaaccgcacttcatgcttggcaggatggacgttcacatccacctgatgcgggtcgatgtccagataaagcacgaaagcaggctgctgatcggccccgagcttgccttcgcaggcctggcgaatggcgtgattgatgagacggtcgcgcatcatgcggccgttgacgtagcaatactggatctccgcaaacgcagcgctgctcgcgttcggatcggctacccagccgcgcagcgccagatcgccgtgctgccactcaatggccagcgcctgttccagaaacggggtcccgcaaatggcgcccagccgacgctctttctgtccaccttctgccaccgcgcgatactggcgcatcaccttgccgttgtggctaaggttgatggtgacatcaaaacgcgccagcgcgatacggcggatgatctcgtcgatgtgtccgaattcggtcttctcggtccgcatgaacttgcgtcgggcgggggtgttgtagaagagatctaatacttcaagcgtcgtgccgacagggtgcgccgcgggtttgaccgtcacatccatatcgcgcccttcggcgtaagcctgccaggcttcctgctgttcggcggtacgggaggtcagcgttaagcgcgaaaccgagctgatactggccagcgcttcaccgcgaaagccgaggctaataatcgcttccaggtcatccagagaagctattttactggtggcgtgacgggccagcgccagcgccagctcctcttttttaatgccgcagccgttgtcgcgaatgcggataagcttcgcgccaccgcgctcgatatcaatatcgatgcgggtcgcgcccgcatcgaggctgttttccaccagctccttcacgaccgacgcagggcgttccaccacctcaccggcggcgatttggttcgcaagctgcggcggcagaacctgaatcggcatgaattctccttagttggtcgcggtcatctcacccggtagcgctgcgctggccgtctgggcagcgccgctctgtggcgcagactgcagcggatgggcatcaaagtatttacgcagaccgttataaatcgcttcggcaatttgctgctgatagctgtcgcttcccagcagacgctcttcaccgttgttactgataaagcccgtctctacaaggatggacgggatatctggcgagcgcagaacgccgaggctggcatgttcaggacgacgcttatgcagcacaccaatgctttgcagctggttcaatacattagtggccacatcatacccgacgcgctgagaatgaccgaactgtaaatccagcaccgcctggctgagatacgggtctgactggctgtttgccagcacatcgcccgcaccgcctagcagttcagactgcttctcatgctcttccagccagttggccatttcgctgttggcgcgacggttcgagagtacccataccgaggcaccggtcgcgttacggttaggcgcagcatccgcgtggatggagaccaggaagttcgcattctgcttgcgtgcgacgtccgaacgccccattaccgaaatgaagtaatccccgtcgcgggtcaacacgcctttgaacgtagggtcgtcgttgagcagtgcacgcaatttacgggcaatggcgatggtgacatttttctcttgcgtcccacccgggccaatcgcacccgggtcctgtccaccgtgacctgcatcaatggcgataatcactttgtcaccgctggtcgcagcacggcgcgtactcaccgccggacgggtcaccgtattgctgctggttgccgcagtgatgcgatcgttctgcgatttaaacggattacgcgcgggttcagcaggacgcggcgtatacaccggttcttccacgcgtttggcaacgacaggcggcggtggaggcggcggcgggacatcggcattgatggtaaagaccaccgtatagttcgccccgttttgctgcttcaccgccttcgttttgcccttttcggtcagatcgaccaccaggcgtaacgactggctatcctgcggcgtacccgaacggatacttttcaccaggttgttgccgctgaactgcagcggtaatccctggatcacgcctgtctgtttgatatccagcgccacgctgtggctgtctggctgtgaaaacgcatactcaggatcgcccataaagctgaacgtgattcgagcctggctttcgccgttcgatacctgaatatctgagaggtttgccgccccggcctgcgcgcacagcagcacggtggcagccaacaaccaacctttaacgcgatttatcatcccgtcatccctacgcttaaccggccagtcgcgccagtaaggaactgcctgatgaggaaacagcactgatgcgtgcctcacgcccttgagcctggtaatctaagtgaatttcgacatccgggtcaggcagcacacccgcaccttgttgcggccactccaccaggcaaatggcgtcgttggcaaaataatcacggatccccataaattccagctcctcaggatccgcaaggcggtataaatcgaagtggtacaccatgagattttcaagggtgtacggttctaccagcgtgtaggttgggcttttcacattcccgttatgccctaacgcctgcaaaaaaccccggctgaaggtggttttacccgcccctaaatcaccatacagataaatgacggttgccccctgacaggcctgcgccacgcgcttgccgagttctaaagtggcttgttcatcaggtaaaggaatcgctcgattagtcattttctacgtcaatcacatccgggttaactacacgccgcagcgtgcaaaagagatcggtggccagcataccgcgcgtaccgtaacgcgcagccagtttatctgccgcaacgccgtgggccacgcagcccgcacaggctgcatcataaaggggaagtttctgtccaagcaatgcgccgatgatgccggaaagcacatcgcccatgccgccgctcgccatgcccgcatttccggcatcaataatgccctgcgtctcgtcacaggcgacaacggttcccgccccttttaaaacggcaacacctccgtaacgttttaccagacgctgagcagaaagtaagcgatcgctttcaatttctgccacgctgcagttaagcagccgcgcggcttcgccggggtgtggcgtcagaatgcgattgtgacgcttatccgggtttattgccagaaggttaagcgcgtcggcatcccacagcatcggtttgcgaaaattctcgaccttttgcagggcctgtttaccccacgcctgctgcccaagcccgggaccgatcaccaccacgtccgcccattcgaggctttcctccagcgtctggagcgtaagctcatggaccatcagctccggtcgggccgtgacgatcggcgcaatattctcaatgcgagtgagcactcgcactaatccggcgccgctgcgcagagccgcttcaccggtcatgcgaatcgcacccgccgtaccgtggtcaccgcccacaatcaccagcctgccgtgatcgcccttatgtgacgttggtcgtcgcggcgggagccacgctgcaagctgcgacgcatcataacgcatgaggtgcgtttcctgcccggccagccagctctccagccccagcgcactgtggtgcaacacgccaacgacatcccgcgctttgccggtcagtaatcctggcttcagggcgataaaggttaccgtatgtgccgcctgaatcaccgcccccggcgtcgcacccgtttgtgcaatcaggccagagggaatatccagggcgactaccggcgcggaatgtctgttagcgtgttcaataagcgcggcaatgttttcgcgaggcgcgctgcgcagcccagtgcccagcagcccgtcaacaatcagatcaacatcctctggccagacgatatcaggcgcatgaatcacaccgccggcgttcagccatgcctcccgcgccgcgctggcctcttccggcagcggtttatcactttcgagagccagcaaggtcacgcggatacccgcagccaccgcgagacgggcgacgacgtagccgtcaccgccgttgttgccgtgcccgcacagaatcagccagtgggcggcctgcggccaggcgctacgggcaacgtcaaacgctgcctcacccgcgcggagcatcagttcatacagggtaatcccgaggctgtctgcagcctctttttcggcgcgccggaggtcatccgcatgccagatggaatgtggtatacttgcggggtttttcttcaccgtatggtccgtcatgtcacagcccctcgatctcaatgaattagcgcaaaaaatcaaacagtggggtgctgagcttggcttccagaaggtaggcattaccgataccgacctctccgccagcgagcccaaactgcaggcctggctggacaaacaataccacggcgaaatggagtggatggcacgtcatggcatgatgcgcgcccgtccacacgagcttttgccgggcacattacgcgtcatcagcgtgcgcatgaactacctgcccgccaacgcggcctttgcgcgcacgctcaaagacccctcgctgggttacgttagccggtacgccctcggtcgtgattaccataagcttctgcgtaaccgtttaaaaaaactcggggaaactattcaacagcactgtgtttcgctgaattttagaccctttgtcgattccgcgcctattcttgagcgtccgatcgccgaaaaagccgggcttggctggacaggtaagcactcacttattcttagccgcgacgccggatcgttcttcttcctcggtgaactgctgattgatttaccgctgccggtagacggcccggtagaggaaggctgtggccgctgcgtggcctgtatgaccatctgccccaccggcgccatcgtcgagccttacaccgttgatgcgcgccgctgtatctcctacctcacgatcgaactggaaggcgccattccggaggagttccgaccgcttatcggcaaccgcatctacggctgcgacgattgccagctcatctgcccgtggaaccgctattcacagctcaccgacgaagaggatttcagcccgcgcaaggcgctccatgccccgccgctcgctgaactgttcgcctggaccgaagcctggttcctgaaagtgacggagggttcggccattcgccgtatcggccatctgcgctggctgcgaaatgtggccgtcgcgctggggaatgccccgtgggatgaagcgaatattcgggcgcttgaaagccgtagaggtgagcacccacttcttgatgaacacatagaatgggcgattgcgcagcaagttgagaaacgtaatgcctgtgtggtcgaggtgcagctaccgaagaaacagcgtctggtgagggtgattgaaaaagggcttccgcgggatgcctgaactattcacagcctgtgaataaaattacaaactcaagcgccatctgggctggagaagagatcaagtgatctcaataacattttgaaatcaaattttatgaactaaatacagtaacttatgaagatattattcaccctgccaagttttaaccctgtttcggttaagcgcagtttctgtggataactctgttcacaagagtatttcagagaaaacagaaaacgtccccagcgatgcttttcgctgtggatattttagagatgaagaagaatttggagcgggaaacgagactcgaactcgcgaccccgaccttggcaaggtcgtgctctaccaactgagctattcccgcttgggtggtccgtgctgtggaagcactttcaaattttggagcgggaaacgagactcgaactcgcgaccccgaccttggcaaggtcgtgctctaccaactgagctattcccgcttgggcagtctgtgctgtgaaagcactttcaaattttggagcgggaaacgagactcgaactcgcgaccccgaccttggcaaggtcgtgctctaccaactgagctattcccgcaaatctgcactgcttttgttgctgtcgtaacgtgtaattctctgtcgttacgggaggcgcattatacgagaaatccttttagctgcaaccccccttaaagcgattttttcgaaattcagttcaaatgcttatttaatcggcaagctgcacaatttaacgacaaaaacccggccacgcaaggcgccggatctcaaaatcacagcttaataaagttttcgcggtagtaagaaagctccgccacggactctcggatatcgtccatcgcctggtgcgtcccctgctttttaaagccgtcgaggatttcaggcttccagcgacgcgccagctctttcagcgtgctgacatccagatagcggtagtggaagtaagactccagctccggcatgtacttaaacaggaaacgacgatcctggccgatgctattcccacagataggtgatttgcccgccggaacccactgtttcaggaactcaagcgtcgccagctccgcctcacggtcacccatcgtgctcgccttcacgcgttccaccaggccactgccggtgtgggtacgcacgttccactcgtccatcaacgccagctggtcatcagactgatgcaccgcaatcgtaggcccttccgccaggacattcaggttggcgtccgtcaccagggtcgcaatttcaatgatgcgatcgcgctcgggatccagcccggtcatttcgagatcgatccaaatcaggttgttttcatccgcgctcatgttattttccacccttctcgcataaccggcagtagcaggttaactagtattaattagagtgtatcatagaggttttgccccctacgggcgaccaggagccagtgcgattgagtaaaaataaactctccaaagggcagcagcgccgcgtgaatgccaatcaccagcgccgtcttaaaaccactgcggagaaggtcgattacgacgacaacctgtttggcgacccaacggaaggcgtagtcatcagccgtttcggtatgcacgctgacgtggaatccgccgatggtgcgattcaccgctgcaacatccgccggaccattcgttctctggtgaccggcgaccgcgtcgtctggcgaccgggtaaagaggcggcggaaggagtaacggtaaaaggtattgttgaagcggtccatgagcgcacgtccgtgttaacccgtcccgatttctacgacggggtcaaaccgattgccgccaacattaaccagattgttatcgtatcggcgattttgcccgaactgtcgctcaatattatcgaccgatacctcgtcgcctgcgaaacgctgcaggttgaaccgatcatcgtgctgaacaaaatcgatctgctggacgacgacggaatggccttcgtcaatgagcagatggatatctatcgcaaaattggctatcgcgtcctgatggtctccagctacaccaaagatggcctgaaaccgcttgaagaggcactgaccgaccgcatcagcatctttgcgggccagtccggcgtgggtaaatcgagcctgctgaacaacctgcttggccttcagcaagagatcctcaccaacgatgtgtctgacgtctcgggcctgggccagcacaccaccaccgcgtcacgcctgtatcacttcccacatggcggcgacgtgatcgactccccgggcgtgcgagagttcggtttatggcaccttgagccggaacaaatctttaacggatttgtcgaattccatgattatttaggcgcttgcaagtaccgcgactgtaaacacgataacgacccaggctgcgctatccgtgaagcggttgagaaaggcgaaatcgcggagacccgcttcgagaattatcaccgcattcttgagagcatggatcaggtaaaaacgcgtaaaaacttttctgattctgataactgacaactaagctaagcatcgctaaaatcgtccccttttttcaggttccggtggcttaccgccggatcaggaacgacaaaacaatggcctggaggctaccttgttaaacgcatttaaactttcgcttcaatacattctgccaaaactgtggctcactcgcctggcgggctggggcgcgagcaaacgcgcaggctggctgaccaaactggtcatcgaccttttcgtaaaatattacaaggtcgacatgaaagaggcgcagaagccggataccgccagctaccgcaccttcaacgaattcttcgtgcgcccgctgcgtgacgacgtgcgcccggtgaacaccgaccctaacgtcctggtgatgccggcagacggcgtgatcagccagttgggtaacatcgaagacgacaaaattctgcaggcgaagggccataactacagcctggaagcgctgctggcgggtaactacctgatggcggatctgttccgcaacggtacctttgccaccacctatctgtcaccgcgcgactaccaccgcgtgcacatgccgtgtaacggcatcctgcgtgaaatgatttacgtcccgggcgatctgttctccgtgaaccacctgaccgcgcagaacgtgccaaacctgtttgcccgtaacgagcgcgtcatctgcctgttcgatactgaatttggccctatggcccagattctggtcggtgcgaccatcgtcggcagcatcgaaaccgtctgggcaggcaccatcaccccgccgcgcgaaggcgtgatcaaacgctggacctggcctgccggtgaagcggaaggttccgtggccctgctcaaaggtcaggagatgggccgctttaagctgggctccaccgtgatcaacctgtttgcgccgggcaaagtgaagctggctgaacagcttgaaagcctgtcggtgacaaagctgggccagccgctggcggtctctaccgaaaccttcgtgacgccagatgcagagcctgctccgctgtcacaggaagagatccaggccgagcacgacgccagcccgctggttgacgacaaaaaagacgaaggctaacaacagaaggatcgctgacgtgcgcccgattatcgttctactgatggcctggtgcctcagcatgggggcgtacgcagcgacagcccccgacgccaaacagataacccaggaactggagcaggcaaaagcggccaaacccgctcagccagagaccgtcgagtcgctccagtccgcactgaacgcgcttgaggagcggaaaggctcgcttgagcgcgctcagcagtatcagcaggttatcgacaacttccccaaactctcgcagacgctgcgcgcgcagctcaataacttgcgcgacgaaccgcgcgatgtgccggcagggatgacctccgacgcgttgaaccaggagatcctgcaggtcagcagccagcttctggaaaagagccgccttgctcagcaggagcaggagcgagcgcgcgaaattgccgactccctcagccagcttccgcagcagcaaaccgacgcccgccgccagcttaatgaagttgagcgccgcgtggggacacaaaacggcaacacgccacaggcgcaggcccaaaatctgggcctgcaggcagaatcggctcgcctgaaggcccttgtcgatgagctcgagctggcgcagctttccgccaataaccgccaggagctgtcgcggatgcgctcagaactcgctcagaagcagagcgagcagctggacgcctatcttcaggccttgcgcaaccagctcaatagccagcgccagcgtgaagcggagcgcgcgctggaaagtaccgagctgctggcagaaaatagcgataacctgcctgccggcatcgttgagcagtttaaggtcaaccgtgagctttcggccgcgctgaatcaacaggcgcagcgtatggatctggtggcctcgcagcagcgtcaggccactaatcaaacccttcaggttcgccaggcgctcaacaccctgcgcgaacagtcccagtggctcggatcgtcaaacctgctgggcgaagcgctacgcgcccaggtcgcgcgcctgccggagatgccgaagccgcagcagctggataccgaaatggcccagctacgtgttcagcgactgcattttgaagatcttctcaataagcagccgcaaatccgccagatccgtcaggctgacggacagcctctgaccagcgagcaaagccgcattctggaagcccagctgcgtacccagcgtgaactgctgaactctctgctccagggcggggatacgctgattcttgagctgaccaagctaaaagtgtccaacagccagctggaagatgcgttgaaagaggtgaacgaggcgacgcaccgttatctcttctggacgtccgacgtgcgtccgatgaccttctcgtggccaattgagattgtccaggatctgcgccgtctgatttcgctcgataccttcagccagctgggacaggccagcgtgatgatgctcaccagcaaagagaccattttcccgctgctgggggcgttaattctggtgggcttcagcatttactcacgcagacatttcacccgcttcctcgagcgttccagctcccgagtggggaaggttacccaggatcacttctggctgacgttgcgcaccgtattctggtcgattctcgtcgcctccccgctgccggtgctgtggatgacgctgggctatggcctgcgggaagcctggccctatccgctcgcggtagcgattggcgatggcatcaccgccacggtgccgctactgtgggtggtgatgatttgcgccacctttgcgcgacccaatggcctgttcatcgcccactttggctggccgcgtaatcgcgtggcgcgcgccatgcgttactatctgatgagcatcgggctgattgtgccgctgattatggcgctgatcatgttcgataatctcaacgaccgggagttttcaggctcgctgggccgcctctgctttatgctgatatgcggagcgctggccatcgtcacgctcagcctgaagcgcgcgggtattccgctctatctggataaaaccggcagcggcgacaatatgttcaaccggctgctctggaacctgctgctcagcgcaccgttgattgcgatgctggcagccgcggtgggttacctggcgacgtcgcaggcgctgttggcacgtctcgaaacctcggtggccatctggttcctgctgctggtggtgtatcacgttatccgccgctggatgctgatccagcgccgccgtctggcgtttgaccgtgccaagcatcgccgggcggagatcctcgcccagcgcgcgcggggtgaggaagagccaaaccacgttaacagtacggaaggtacgacggaggcggatgaggtcgaactggatctggatgccatcagtacccagtccctgcgtctggttcgctccatcctgatgctgattgccctcctgtcggtgatcttcctgtggtcggagatccactcggcatttggcttcctggagaacatctcgctgtgggacgtgacctctacggtgcagggcgttgaaagcctggagccgatcaccttaggggcggtgctgattgccattctggtgctgatcatcaccacccaactggtgcgcaacttcccggcactgctggagctggcgctgctgcagcatctggatttaacgccgggtacgggctatgcaatcacgaccattaccaagtatctgatcatgctgtttggcggtctggttggcttctcgatgatcggcattgagtggtcgaagctccagtggctcgtcgcagcgctcggcgttgggttaggttttggtttacaggagatcttcgccaacttcatctcgggcctgattattctgttcgaaaaaccgatccgcattggcgataccgtcacgatccgcgatctgaccggcagtatcacgaagatcaacacccgagcgacgacgatcagcgactgggatcggaaagagatcatcgtgccaaacaaggcgtttattaccgagcagttcatcaactggtcgctctcagactccgttacccgtgtggtgctgacggtaccggcaccgtcggacgcgaacagtgaagaggtcacccagatcctctacactgccgcggaacgctgctcgctggtcatcgacaacccggcgccggaagtcttccttgtggatttacagcaggggatccagattttcgagctgcgtatctacgccgccgaaatgggacaccgtatgccgctgcgccatgagatccaccagctgattctggcgggcttccgcgagcacggtattgatatgccgttcccaccgttccagatgcgtctggaaagcctggacgggcgtaaaacgggaagaacgctgacgtcagcggcgcgtacgcgcccggcgggcagcttataacgcgtctcccctccctttcgggaggggaatattcccgctacgccacttctgcgatgtacgccgtcacgcgtcgacggtaattctcataaatccccatcgctaacagcgagaagaagattgggccgcccaccatccacagcgcgctgttccagtcgttcgcctcaatcaccggctgaatgatggtgaaaatattggcaaacgccaccaccagcagcaccaccgtggtggccaacagcgttgccgcgcgggttttgaagatcacaaacggacgctcaagatcctgctttgccttaaagaacggaaatgccagggtcaggaacaggtacggcagcgtcatcgacacgttcgccatcagggtcagcttgttgtaaaacgcagacgccgtgtcgccgccaaatgagaccagcagaataaacacgcacaccagcagacactgcatccacatggcgttggcaggcatgcctgcggtattgagctgggtcatgcgtcccggccacagcgcttttggcgtaccctggatgatcgctttcagcggcgagtagatcagcgtgaagaatgcgccggtataggcaaggaacatcgacaggccggtaatgcgcgcaaaccagatccccatggtggccgatgcttccggcgtcaggtgcatggcgttacccagcgtcatccccaggcttttcatcagcacgtaggtaatgttcccgaggttggtggtgttgttactcaatacctgctgccagttggtgctgacgccccagaggaaaatcgccagtgaatagccgatggaaatcacgatagcggcaaaaataatccctttggcaaagttcttttccgggttctcggtcttgtcgaccagcccgcccaccgcttcaataccgccgtaggcgaagatggcaaacaccacgaaggagagcatggccagcccggactggtaacctggattaggcgaggaaacgaagttcacctcctgcgcaaaatgaccaccgttcaggcacagaatggcaatactcaccagcagcagcaccaggttcagacacatcacggaaataccgccaacggcagtgatacgggcaattttgttgatgcctttagacgccaccagcgtgaccaccaccatccagcataccgccagaatcccgacgacctgcgtggagctcagccccgccagagaccagacctgcgttttatcggcaccgaaaagaaacgtggagaatggcacccagactttggccgccgtgctgaccatccagacgacataagaggagaaccacataaacgtgccgataaaggcataacgcgggccgacgctgttgttcatccaggagtagatcccgccctcttctttccggtaagccgagcccatctccgccatcatcagcgcaaacgggataaagaagaacagagccgaaacgatataaaacggcgtcgcgctgtaacccatcagatagaacgctgatgggctgttggcaaagccaaagactgaggtaaatatcatcaggatgagcccggtaagggtcatctttttgagtgactgggacatagaaccatccgaaaaggaattaaactgcgcggatggtagcagatgaccagactaatattgtggctataaggggcaaattaagaaaaagacccgtatattgataatatggcagtttttaatgtggcagggccaatgaccgagtaggccgggtaagcgacagcgccacccggcaattctttaagcgcgatcgaccgtaaaggcaatcacatcgccaagctgctctgcgcccagggccagcatgaccagacggtcaacacccagcgccacgccggagcaatccggcagacctgcttttaatgcttcaagcagattaacatcaataggctgctgcggcaggccgcgcgcggcgcgcttgcggttatcctgctcgaaacgttgcgcctgctcgcgcgcgtcggtcaattcgtggaagccgttcgccagctcaatgcctttgtaatagacctcaaaacgctctgccacacggtggtcttcggtactgatctgcgccagtgacgcctggcttgccgggaagtgatagacaaacgtcggacggtctttgccaatctgcggttccacgccgaaggtgaacagcagctgcagcagcgtgtcgcggtcctcttcggtatctgccacgttgctcagatccagttttgccgccacttcgcgcagcagggttttgtccgccgacagcggatcgatttccagatggcgctggaaggcctgctgataagagagcgtttccgcttctgagcaatccagaacctgctgaagcagatcgtccacctcattcatcaggcggtacatatcataatgcgggcggtaccactccagcatggtgaattccgggttgtggtgacgacccatctcttcgttgcggaagctacggcacagctgatagaccggaccacatcccgccgccagcaggcgtttcatgtggtattccgggctggtcatcagatacaaattcatgccctgagagtggccggggccaacaaaacgggtttcaaacgggaccagatgaatatccgttaccgttgcctgactcatgcacggggtttccacctccaggacgccgcggtcggcaaagaaacggcggatctccgtcataattgcagcgcgttttaacagattagggatggatgcgctcggctcccaggtggccgtttcgctcatgagttgttctccgatttcagacaagggcacgaagtctactcgttagcagggacagagacaaattttgcgcagtaaaaaagcgcatttcatttaggtgaacaattgcgtgatgcaattcatcaatctcaatgataaatcgccggacagaacagcaaaaaaatcgaacacgtcaaatttccctgacatctacacggttatactgttttacccataaaggagcagtggaaacgctttcgcaatcgtccttttggacgggtgaactacctttagtttgtcgcgttgcgaaataacaaaaatctggaggaatgtcgtgcaaacttttcaggccgatcttgccgtaataggcgctggcggggctggattacgtgctgcgattgctgcagcgcaagctaatcccaacgctaaaatcgcattgatttcaaaagtctatccaatgcgcagccacacggtggccgcagaaggaggatccgccgccgttgcgcaggatcatgacagctttgaataccatttccacgacacggttgcagggggcgactggctttgcgaacaggatgtcgttgactactttgtgcaccattgtccaacggagatgacccagcttgaacagtggggatgtccgtggagccgccgtccggacggcagcgtcaacgttcgtcgcttcggcggcatgaagatcgaacgtacctggttcgccgccgataagaccggcttccacatgctgcacaccctgttccagacctcccttcagttcccacaaatccagcgctttgatgagcatttcgtcctcgacattctggtggatgatggacacgcgcgcggcctggtggcgatgaacatgatggaaggcacgctcgtccagatccgcgccaatgcggtggtgatggcgacgggcggtgcgggccgcgtttatcgttataacaccaacggcggcatcgttaccggcgacggtatgggtatggcgctcagccacggcgtgccgctgcgcgatatggagttcgtgcagtatcacccaaccggtctgccgggctccggcattctgatgacggaaggctgccgcggtgaaggcggtatcctggtcaacaaaaacggctaccgctacctgcaggattacggcatgggcccggaaaccccgctcggcgagccgaagaacaagtacatggaactcggcccgcgcgacaaagtctctcaggctttctggcacgagtggcgcataggcaacaccatctccacaccgcgcggcgacgtggttcacctcgacctgcgtcacctgggcgagaaaaagctgctggaacgtctgccgttcatctgcgagctggcgaaagcctacgtcggcgtcgatccggtgaaagagccgattccggtccgcccaacggcgcactacaccatgggcgggatcgaaaccgaccagcagtgcgaaacccgtattaagggtctgttcgccgtcggtgaatgttcctccgtgggcctgcacggtgctaaccgcctcggctcaaactcgctggccgagctggtggtctttggccgcatggcgggcgagcgcgcgatggaacgagcggcaaccgcaggcgaggctaacggtgccgcgctggatgcgcaggtcgcagacgttgaaaaacgcctgaaagacctggtgaaccaggaaggtaacgagaactggtctaagatccgcgacgagatgggcctgtcgatggaagaaggttgcggtatctaccgtacccctgagctgatgcaaaaaaccgtcgataagctggcggaactgcaggagcgcttcaagcgcgtgcgcatcaccgacacctccagcgtcttcaacaccgacctgctctataccatcgagctgggccacggcctgaacgtggcggaatgtatggcgcactctgcgctggcgcgtaaagagtcgcgtggggcgcaccagcgtcttgatgaaggctgtaccgaacgtgacgacgtcaacttcctgaaacacactctcgcctggcgcgatgcggatggcaccacacgtctggactacagcgacgtgaaaatcaccacgctgccgccggctaaacgcgtgtacggtgcagaagcagaagccgccgagaagaaggagaaggcgaatggctgagatgcaaaaactgaaagttgaagtggtgcgctacaacccggaagtggatgccgcaccgcacagcgctttctatgaagttccttacgacgagcaaacctccctgctggacgcgctcgggtacatcaaagacaacctggcaccagacctgagctaccgctggtcctgccgcatggcgatctgcggctcctgtggcatgatggtcaacaaggtgccgaagctggcctgtaagaccttcctgcgtgactacaccaaaggcatcaaggtagaagccctgggcaacttccctatcgagcgcgatctggtggtcgatatgacccactttatcgaaagcctggaagccattaagccctacatcattggcaacccgcgcacgccggatcaggggccaaacaaccagaccccggctcagatggcgaaataccatcagttctccggctgcatcaactgcggtctttgctacgccgcctgtccgcagtttggcctgaaccccgagttcatcggcccggccgccattacgctggcgcaccgctataacgaagacagccgcgaccacggtaaaaaagaacgtatggcgcagcttaacagccagaacggcgtctggacctgtacctttgtgggttattgctccgaagtctgtccgaagcacgtcgacccggccgccgccattcagcagggtaaagtggaaagctcgaaagactttcttatcgctaccctgaaaccacgctaaggagtgcatgatgacgactaaacgcaaagcctatgtgcggcctgtgccgtccacctggtggaaaaacctgccgttttatcgcttctacatgctgcgtgaaggcacagcggtaccggcggtctggttcagccttgagctgatgtacggcgtttttgccctcaagcatggcccggaaacctgggccagctttgtcggtttcctgcaaaacccgatcattgtcattctgaacctgatcgtgcttgcagccgcgctgctgcataccaaaacctggtttgaactggcgccaaaagcggcgaacatcatcgtaaaaggcgagaaaatggggccagaaccggtgattaaggggctctgggcggtgacgattctggtcactgtggtcattctgtttgtcgcactgttctggtaaggagactactgtgatcaatccaaatccaaaacgttctgacgagccggtcttctggggcctctttggcgcaggcggcatgtggagtgccatcattgcccccgtcatcattttgctggtgggcattatgctgccgctggggctgttcccgggcgatgcgctgagctacgaacgcgtactggcattcgcgagcagctttattggtcgcgtgttcatcttcctgatgatcgtcctgccgctatggtgtggcctgcaccgtattcaccatgcgatgcatgacctgaaaatccatgtaccgagcgggaaatgggttttctacggactggcgaccattctgaccgtggtgacgctgattgccgtagtcaccatctgacgcctcgggcccgccatccggcgggccttttatttctgcatcttccccaccagccattgagcaaactcgcgcattgcgggcgtctctgcgcgtgactgcagcctcgtgagccagtagctaccaaggtcaatctgcgtcgcaaagggttgtacaatgcgctcactgttcagcagatgggtgaacatatcgacaggggcaatcgcgatgcccgtacctgcctgcgcggcttccagcatggtcacggacgaatcaaataccattacccggtgcgtcggtgaaggcaggttttctcccgcggcctgcatccaggcggtccactcgtcgcgccggtaagaacgcaggagggtaaacttcaggatatcggcaggggtgtgcaacgcggcagcaatgtcaggcgtgcaaagcggcgcaagcggtgcagggcaaagaaacgtcgcttccgtgccgtgccacgccccgccgccataacgaatggcgtaatcaagcccctcggctgccggatcgacgcgattgttgtgcgtcgacagctgaagatcgatatgcggatagcagcgacgaaagtcagcgagctgcgagaataacacccccgtagcaaaggtacccaccacgccaattttcagcttctcctgggcgcgctggctggcaaagcgatccagcattccggcaattcggtcgaacgagtcattcagtaccggcagcaaattctcgccttccgtggtcagcatcagcccacgcgaaacgcggacgaacagctggcaattaaggtgctgctccagcgcctttacgtgctggctaatcgcggaatgggtgacattcagctcgatagcggcatgcgtaaaactgaggtgccttgcggccgcttcgaagacgcgaagcgaattaagcggaagatagctgcgggtcatggtcccatccgttagaaaaattaacagctaatgctaaatttaaccgtttgtcagccacagtcaaatccaacagactacagcggtctgacgggcccggacactcccttgaactgctattacggaagataaccgatgatgacaaaatccctaagctgtgccctgctgctcagcgtcaccagctctgcattcgccgcaccgatgtccgaaaaacagctggctgaggtggtggaacgtaccgttacgccgctgatgaacgcgcaggccattccgggtatggcggtggcggtaatttatcagggtcagccacactactttaccttcggtaaagccgatgttgcggcgaacaaacccgtcaccccgcaaaccctgtttgagctgggctctataagtaaaaccttcaccggcgtactgggcggcgatgccattgcccggggtgaagtagcgctgggcgatccggtagcaaaatactggcctgagctcacgggcaagcagtggcagggcattcgcatgctggatctggcaacctataccgcaggcggtctgccgttacaggtgccggatgaggtcacggataccgcctctctgctgcgcttttatcaaaactggcagccgcagtggaagccgggtaccacgcgtctttacgctaacgccagcatcggtctttttggtgcgctggcggtcaaaccttccggcatgagctatgagcaggccatgacgacgcgggtctttaaacccctcaagctggaccatacctggattaacgtcccgaaagcggaagaggtgcattacgcctggggataccgtgagggtaaagcggtccacgtttcgccagggatgctggacgcggaagcctatggcgtaaaaactaacgtgaaggatatggcgagctggctgatagccaacatgaagccggattctcttgaggctccctcactcaagcaaggcattgctctggcgcagtctcgctactggcgcgtgggggctatgtatcaggggctgggctgggagatgctcaactggccggtcgatgccaaaaccgtcgtcggaggcagtgataacaaggtggcgctggcaccattgcccgtggcagaagtgaatccacccgcgccgccagtcaaagcctcctgggtccataaaacaggctcgacgggcgggtttggcagctacgtggcatttattcctgaaaagcagctcggcattgtgatgctggcgaataaaagctatccgaacccggcacgcgttgaggcggcataccgtatcctcgacgcgctgcagtaaaacattgccgggtggcggcttcgccttacccggcctacaaaaccacggtgtgcggcgaaattcgccgcacaatcttccgcatttttcctgctgtcatctacacttaacaaaaaacagtaaggaaactcctatgcgcattctgcctgttatcgccgcggtgacagccgcgtttttagtggttgcctgcagttcccctaccccgcctcctggcgtcaccgtcgtcacgccttttgatgcacaacgcttccttggaacatggtatgaaatcgcgcgactcgaccatcggtttgagcagggtttagagaaggtcacggcgaattacagtccgatggatgatggcggtattcaggtgatcaaccggggctataatcccgatcgggagatgtggcagcagtcggtgggaaaagcgtacttcactggcgacccgcgacgggccgcgcttaaggtctctttctttggtccgttttatggcggttataacgtgatagcgctcgacaaagcgtatcgccatgcgctggtctgtgggccggatcgcgactacctgtggatactctcccgcacgccaactatttcaccagaaatgaagcagcagatgctggacgtcgcgacccggcaagggtttgatgtatcaaaacttatctgggtaaaacagccccattagtgggtgctgagcttaagcccaacgatcccggccacaatcagagcgaggctggcgatacgcgccagactcgctgactcgccgagtagcaaaatgccggtgatggcggcccccactgcgccaatacccgtccagacggcataagccgttcccacaggcaaagagcgcatcgcccaggatagcagaacaatactgacgatcatggcggtaacggtaatgacgctgggcgtcaggcgggtaaatccgtgggtgtacttgagaccaatcgcccataccacttcgagcaggccagcaataaaaagaatgatccaggacatgtcaggctccttaacttaatgcaagttggggccgtccccggtgaaagaaacgcttacgggtcgtcccgtaaggcagagattacgccacctattgtggttagcgtgctattttttttcaatccttttttgctgaacacgttaaggcaagaaatagccgcagtatggcgcggagttccggcttttagcactcatccgacttctctatgatgatgtgctttctgatggcaggaagccaaaccactagccgactgcgaataaaatatgttcaaaattcttttgattgaccgttgtcacttcacccgcgcggggtttgaagcatggctcaatcattccggtttgttcccgggacactacgtagtgaccgggctgaataatctgtttcttgccagagaacacattctgcaatggaaaccaacgctggttatcgctgacctgtacggcttcaggcaggatattcaccattttcagcagctttcttccctgcttaacgcaagtgaacgattaccgtttattttgctgcagtcgggagaggatagcggcatgaccgactggcttgggaagtttccggtctggtcgtcgctgttgaaaaacgccagtctcgaagaggtggcaacggttatcaacgacgcgttaatttcgcgcgccagcgctgacaggccaacggcggcagcccctttgctgacccgacaggaagagaaggtgctgacgttatggatggacggcgcgagcaatcaaaaaattgccgctcacctgagcatcaacggaaaaacggtttatacctataaacgcaatatccgcatgaaattacatatggatacgcgtttttctccgttcttatccctgcaggaatcagaaagctgacggtacgaaacccggctggtcccgtaccgtttattcattactgctgagcttttgttgccgcaccagagattgcgctaccaccttcagaaatatcctgaccgacgccacgcgtggtattacaggccgttaacactgaagaaagtaccaggactgaaaagatcgctgcaattgtcttcttaaccataatatcttccttttatagccaaagttgttttgtgtatagcaacttaagaatagacaaaatcccgccggttgacggaagaggaagcatttttaggaaaattagacgaacttagctggcggcgtgagaaatgatatgacccagatcctggatatcttgtcccattccacgcgtggtgttacagccagaaagcaatgcactggagagcgctaacagaagcagaattttaacggtacgtttcatcatccctgcctgcaaaaaatcgggcgcagcgggcgctgcgccttcaatcatacgtaaattacttcacgcgggatacgtattcgccggagcgggtatccactttgatcacttcgccagtctgtacgaacagtggcactttcaccactgcgccggtagacagtttggctggcttaccgccggtacctgcggtatcacccttcagacctggatcggtttcaacgatttccagttctacgaagtttggtggggtcactgcgataggctggccgttccacagggtcacgatgcactcagcctgatccagcagccatttagcgctgtcacctaccgctttctcatcagcagacagctgttcgaaagtggagttgttcatgaaatgccagaactcgccatcgttgtacagataggtcaggttcatatcaacaacatcagcgccttcagcagagtcagtagacttgaaggttttctcaacacgggtaccggtcagcagacggcgcagcttaacgcgtgcgaatgcctggcctttacctggtttaacgaattcgctggcttcaaccgcgtacggttcgccgtccatcatgattttaagaccagcacgaaaatcgttgctatagtacgttgccataaggccctctaaatttgttaactggtagctaagccacaaaatggcgcatattgtaaccctaaacaccccgtccagagaagattggttatcgcaacttgccgatgtaatcaccagtcctgatgaattgctacgtcttttagacctcgatcagcacccagagttgcttgcaggccgcgaggcaaagcgccttttcgccctgcgcgttccccgtgcgtttgtggcgcggatggagaaaggcaaccccgacgatccgctattaaaacaaacgcttacttcgcaggatgaattcattactgccccgggatacagcaccgatccgctggaagagcagaacagcgtggtgccgggtttactgcacaaatatctcaaccgcgccctgctgctggtaaaaggcgggtgtgcggtaaattgtcgttattgcttccgtcggcacttcccctatgccgaaaaccagggcaataaacgcaactggcaggtcgcgctggactatatagccgcccatccggagctggatgagattattttttccggcggtgacccgttgatggcgaaagatcatgagctggactggctactgactcagcttgaagccatcccgcacattaagcgcctgcgcattcatagccgcttaccgattgttattccggcacgtatcaccgacggccttgtggcacgcctggagcaatcccgcctgcaggtgctgctggtgaatcatattaaccatgcgaacgaaattgacgatgcgtttcgcgcggcgatggcgcgactgcgtaaagcgggcgtgacgctgctgaaccagagcgtgctgctgcgcggcgtgaatgatagcgcccgcgtgctggccgatctgagcaatgctctgtttgatgcgggcgtgatgccgtattacctgcacgtgctggatcgcgttcagggcgcggcgcatttcatggtgacggatgaagaagcccggcagattatgcgcgaactgttaacgctggtttcaggctatatggtgccgaagctggcacgcgagattggcggagagccgagcaagacgccgctcgatttgcagctgcggcagcactaaaaaggcaggtggcgctacgcttacccgccctacagggccgggcgcagcgccattagcacattacatcagttcgggcacttatagacctggcccgtcatctggctggcggtcggcacgaagctggacagcatactctgcgttgggctacttacgccgtaaatcacgttgccgcccattgccgcagcctgattacgcagggcattcgccgctccgcgcatagaaccgccttcctcaccgtgctgacccgacatccagttactttgttcaccggttgccgtgcctaacagctggcattcactgccaggcttatcttccacaaagcgaacgccctggcccgctgccgacagctcattgctggagctacaacccgccagcagcagtgctgcccctacaatccctgcacagacttttacgcgcatgttattcctcgttttcaataagctggacagtaattgtccgtgtgtaaatcttatacctaaaagatgactaaaagaaaaacccccgcgcatttctgcgagccagattccgcgaggcactcctccgacatcttaaatgaattctgataataacctttgggatatcgtgttttagcccccgatcgtttttagtgatgcaacgtacaacttttgtacgcgactaaaaaaggaggttttatgagtgcatcatcctcaggagaggaaaaagtgacatgggtgggttatgtggcgtttgtacttaccatcgtttttttctcgggctttttcgccaaaagcaccgaatggtggcgcgtgctggattttaccgtcttaaacggcagctttggcccggtcaacggcgctctgacgtttcgcggaacgggcggaacgggggcgaaagacggtttcctctttgcccttgagctggctccctcggtcattttatcgcttggtatcatcgccgtcaccgaaggtctgggcgggctgcgtgccgcacagcagcttatgactcccattttacgtccgctgctgggtgtgccgggcgtttgctccctggcgctgatagccaacctgcaaaacaccgatgcggcggcagggatgaccaaagagttaaccgatgaaggcgcgattacggaccaggagcgcgctattttcgccacctttcagaccagcggtagcgccatcattaccaactatttttcttccggtgccgcgctcttcaccgttatcaccatcccggtgattacgccgctggccgttattctggtgtttaaattcgttggcgcgaacgtcctgcgcctgtggatcgcccacatggaaaatcgtcttcaggaggaagaacatgatcgcccagccgcgtaaaaatatcatggatatgtttattgatggcgcccgccgcggctttaccatcgccaccaccagcctgttgccgaacgtcgttatggcgtttgtcatcattcaggcgctcaaggtcaccggcctgctggatattgtcggcaagatatgcgagccaattatggcgctgtggggccttccgggtgcggcggcaacggttcttttggcctcggtgatgagtatgggcggcggcgtgggcgtctgcgccagcctggtcgccgccggcacgctcaacggccacgatgccaccatcctgctgcccgccatctatctgatgggcaatccggtgcaaaacaccggccgctgcctgggtaccgccggcgtaaacccgaaatattatccgcatattattactctttgtgtcattaatgccctgctctcaatgtgggtgatgcagctactcttctgaggagataaaaatggatttttcagtgctgaaccctcaccttttccgcaacgcacatctctacgccccggaggataagggacattgcgatctgctgatcgctgcgggaaaaatcgtggcgatcgaaaaagcgaaccacggaacaacgaggccagactgcccggaaagcgatctggctggggcggtggtttgcccggggtttatcgaccagcatgtgcatttgatcggtggcggcggcgaggcgggccctcacacccgcacgccagaggttcgcctgtctgcactcgttgccgcaggcatcacctcggttgttggcctgctgggcaccgacggcgtgacccggcatcctgaatcgctgctggcaaaaacgcgggcgcttgagcatgaagggatcagcgcatggatgctgacgggggcgtacgggctgccttcgccgaccatcaccggcagtgtcgaaaaagacgtggcgctgattgataaaatcattggcgtgaaatgcgcgatctctgaccatcgttcttccgcgccagccgaggaccagctcgccagtatggctgcccagtcacgcgtaggcgggctgttgggtgccaaagcgggtatttccgtgtttcacctcggcaacagcccaaagctgctggagccgctatttagcatcctgaataacgccgacgttccccgcgtaaaactgctgccaacccacgttaaccgcgcccgggcgctgttccttgccgcgctgagctatgcccgcgaaggcggctttatcgacatcacgaccagcatcagtgaaccgattgacgccgccagcgccatcgtgatggcccgcgaggcgcaggtgccgtttaaccggcttacgctcagttcggacggcaacggcagccagccgaaatttgatgagagcggcaatctggtgggtatgggcgtggcggggttcgaatccctgctcgaaacgctgcagcagctggtcagccggcatcagctgccgctggaagaggcgcttcttccctttacgcgaaacgtggcggcgtttctcgggctggagcataagggacggctcgcgcccggatgcgatgcggatttcctagtactgacggacgatctgaagattcgcgaggtctgggccaaaggccgccagatggtgcgtgaaggtgccgtgtgcgtcaaagggactttcgaatagcacgcaataaaaaaccccgggcatttctgcccggggttcgttctgagaggttcagaacaacatgattacatcatgccgcccattccacccatgccgcccatgccagcagcacctaagtcaggcgcatcgcctttaggcaggtcggtcaccatgcattcggtggtgatcatcagaccagcaacagaggccgcgtactgcagagcagaacgggtcactttagttgggtccaggataccgaagtcgatcatgttgccgtattcttcagttgcagcgttgtaaccgtagttaccttcgcccgctttcaccttgttcgccaccacagatggctcttcaccggcgttagacacgatctgacgcagaggcgcttccattgcgcgcagcgcaactttgatacccacgttctggtcttcgttctgagcggtcaggccagccagtttagcggcaacgcgcaccagcgcaacgccaccacccgcaaccacgccttcttctaccgcagcacgggtcgcgtgcagggcatcgtcaacgcgtgcttttttctctttcatttcaacttcggtcgcagcaccgactttgattaccgcaacgccgcctgccagtttcgctacgcgctcctgcagtttttcacggtcgtaatcggaagtcgcttcttcgatctgcttacggatctgaccaacgcggccctgaatagcggcttcttcacccacgccatcgatgatggtggtggtgtctttgttgattacaacgcgtttcgcctggcccaggtcttccagggtcgctttttccagctccataccgatctcttcagagatgacggtaccgccggtcagggtagcgatatcctgcagcatcgctttacgacgatcgccgaagccaggtgctttaaccgcagccactttcacgatgccgcgcatggtgttaaccaccagggtcgccagcgcttcgccttcaacatcttcagcaatgataaccagcggtttgcctgctttcgcaacggcttccagcactggcagcatttcgcggatgttggagatttttttgtcagccagcaggatgaacgggctttccagctcaacagcgccagtctctggcttgttgatgaagtatggggacaggtaaccgcggtcgaactgcataccttcaaccacgtccagttcgtcttccagaccggtaccgtcttcaacggtgatcacgccttctttaccgactttgtccatcgcttccgcgatcagtttacctacggtttcgtcggagttagcggagatggtaccaacctgagcaatcgctttagagtcagagcacggtacggacagcgctttcagttcttccacagcggaggcgacagctttgtcgataccacgtttcagatccattgggttcatgcccgcagcaacggctttcagaccttcggtgatgatggcctgcgccagaacggtcgcggtggtggtaccgtcgcctgcagcgtcgttcgctttagaggccacttctttcaccatctgcgcacccatgttttcgaacttgtcttccagctcgatttcacgtgctacggaaacaccgtctttggtgatggttggcgcgccgaaggatttatccagcactacgttacggcctttcgggcccagggtcactttaactgcatctgccagtacgtttacgccgcggagcatttttacacgagcgtcgttaccgaattttacgtctttagctgccatgttcttatttcctcaaattctcgtgcgtaaattacgcttcaacaattgccagaatgtcgctctcggacatgatcaacacttcttcattgtcgatcttctcggatttcacgccgtagccatcgttgaaaattacgatgtcaccaactttaacgtccagtggctgcacagttccgttttccaggatgcggcccttaccgacagcgatgatttcgccacgcgttgatttggctgctgcagaaccggtcagaacgatgccgccagcagacttggtttcaacttctttacgtttgacgatcacacgatcatgtaacggacgaatactcattgatagctctcctttgagaaagtcattatcagttatggatgacgccggcccgcatgcggttttccgactagtgccctgagagatggggatagctttttaccccttcaagggggagctgaaaaaaaattttgcgaaagtgttaccatcgcctctcttttggaattggcaggacgatgtcaatgagtggactcaagcaggagttggggctggcgcagggcgtcggcctgctctcaacctccttgttaggaacgggcgtgttcgccgtacctgcactggcggcactggtagccggaaataacagtttgtgggcgtggcccgttctgattgtattggttttcccgattgccattgtgtttgccatcctggggcggcatttccccagcgcgggcggcgtggcgcattttgtcgggctggcatttggcccgcgactggagcgtgtgaccggctggctgtttctctccgttattccggttgggcttcctgcggcgctgcacattgcaaccggctttggccaggcgctgtttggctggcatgacgagcagctgctgttggccgaactgggtacgctggctatcgtctggtgggtgggttcacgcggagcccgctccagcgccaacctgcagacactggttgcggtgctgattgtcgcgctcgttgccgctatctggtgggcgggcgatatcaccgtaaaagagattcccttcccggccgtgacagacgtcgaccactcacagctttttgccgcgctctccgtcatgttctggtgttttgtcggtctggaagcctttgcccatctggcgtcggaatttaagcagcctgaacgtgatttcccccgcgcactgatgatcggcctgctgctggcaggcacggtgtactgggcgtgtaccgtgctggtgttgcacttcaaggctttcggagccgatctcgccgccgcggcatcgctgccgggtatcgtggttgaactgtttggtgtgaaagcgctgtggatcgcctgcgttatcggctatctggcctgttttgccagccttaacatttatatccagagctttgcccgtctggtgtggtctcaggcgctttacagacctgataaccgcctcgcacggctgtctaaacgccagctgccgctgaatgccctgaatgccgtactgggctgctgcgtggtgagtacgctgtgcatttacgccctgaaggtcaatctggatacgctgctcgtctacgccaatggcattttcatcatgatctacctgctgtgcatgctggcaggttgtcgtctgctgaaaggccgttataaagcactggcgcttgtcggggggctactgtgcctgctgttgctggcaatggtggggtggaaaagtatgtacgccatcgtcatgctggcggtgttgtggctggcgctttagtaggcccggtaagcgaagcgccaccgggcaacaaaatcaccgatcgtctttgtgatccagacggtcgtgctgttcatccttacgctgatattccccttcaaacgtgtcgcctggcccggtgctgaacccaccgcccggcatacggctaaagcgcagatgcggcagcagcttcatggtcaggtgcttttgcaccggcggcagaagcagcagaaggccgaggaagtcggtgaagaacccgggcagaattagcagcagccccgcaataatcaacgacacgcttttgatcatctcttccgccgggctttcgcctgcggccatcttttgctgcattatcaggaaatttttgaaaccctgattacgcaccagcgacatgccgatgatggaggtgaaaatcaccagaatcagcgtcagcaggacgcccagcacatgggcaacctggatgaaaatggaaatctcaatgtaaacatagagaaagaaagcaataaacggtatccagcgcactggcatctcctgtgtggcagaggccatcggcccctgtctgaatgtgttcgcgacgcgcgtttgtatgagatggtgacggttagcgaaaattcaatcagtttgcacggatattttttttggaaatattaaagcggtgacccatttcacagattaataattatcatggaatcggctcgataataagtgatccagcttacggcaattcgctatcatcagcatatgatctcgagcatctggctgattgagggaataatcgtcggtcagaaaatattcaaaaccacataaatactgtgtgtttagtacaatccatcggcagcttgaaaagaaggttcacatgttaaacaacattcgtatcgaagaagacttgttgggtaccagggaagttccagcggatgcctactacggtgtccacactctgagagcgattgaaaacttctacatcagcaacagcaaaatcagcgacatccctgagtttgttcgtggcatggtgatggtgaagaaagccgcagccctggccaacaaagagctgcaaaccattcctaaaagcgcggcaaatgcgattatcgcagcctgcgatgaagtgctgaacaacggcaaatgcatggatcagttcccggttgacgtctatcagggcggcgcgggcacttccgtcaacatgaataccaacgaagtactggcaaacattggcctggagctgatgggtcaccagaaaggtgaataccagtacctgaacccgaacgaccacgtcaacaaatgccagtccaccaacgacgcctaccctaccggcttccgtatcgcggtgtatgcctccgtggtgaaactggtggatgcgatcaaccagctgggtgatggcttccagcgtaaagcggttgagttccaggacattctgaaaatgggtcgtacccagctgcaggatgcggtgccgatgaccctcggccaggaattccacgcgtttaacgtcctgctgaacgaagagactaaaaatctgctgcgcacctccgagctgctgctggaagtgaacctgggcgctaccgccatcggtacgcgtctgaacaccccggatggctatcagcagctggcggtacagaagctggctgaagtgtccaacctgccggttgtgcctgcagaagacctgattgaagcgacctccgactgcggcgcctacgtcatggtacacagcgcgctgaaacgtctggcggttaagctgtccaaaatttgtaacgacctgcgcctgctctcttccggcccgcgcgctggcctgaacgaaatcaacctgccagaactgcaggcaggttcgtccatcatgccagccaaggtgaacccagtcgtgccagaagtagtgaatcaggtttgcttcaaagtcatcggtaacgatacgaccgtgaccatggcctctgaagcgggtcagctgcagctgaacgtgatggagccagtcattggccaggcgatgtttgaatctatccacattctgaccaacgcctgctacaacctgctggaaaaatgcatcaacggcatcacggcgaataaagaagtctgcgagggttatgtctataactccatcgggatcgtcacctacctcaacccgttcatcgggcaccataacggcgacatcgtcggtaagatttgcgccgaaaccggtaagagcgtgcgtgaagtggtgctggagcgcgggctgttgaccgaagccgagctggacgatattttctcagcccagaacctgatgcacccggcctataaagcgaaacgatataccgatgaaagcgaacagtaaccgttcaggctaggcttcttaaggcacgtcacttgtgacgtgccttttttctttttaggcgttaccaaaatacaacaattcaatatcaacttgttaataagcaaggcaggtccttatgtttggagcagaactcgtcatcgtcttgttggcgatttatttgggagcacgactcgggggtatcggcatcggttttgccggcggtcttggagtgctcgttcttacccttatctttcagattaaacccggcgcaatcccgttcgacgttatcgaaatcatcatggcagtcattgccgctattgccgccatgcaggtggcaggcggtatggactacctggtgagcctggcggagcgcatgctacgccgccacccgaaatacataaccttccttgctccgctggtgacctggtttatgaccattctcgccggtactggccacaccgctttctccacgttaccggtgattaccgaagtggcgaaagaacagggtatccgtccgtcgcgtccgctctctattgccgtcgtcgcgtcccagatcgcgattaccgcctcgccgatttccgcggcggtggtcttcttcgccggtatcctggagccgatgggcgtgagctacctgacgctgctggcgatctgcattccggtgacgctgattgcggtgatgattaccgccgtgctgtgtaacttcctcggtgctgaactgaaagacgatccggtttatcaggagcgtctggcaaaaggtgaagtgagcctgcgcggcagccaggtcttcgaactgaagccacatgcgaaacgctccgtgctgctgttcctgattggtattgtcgccgtcatgttctatgcgaccgccatcagcgataccgtggggctgatccagaacccggtcctgccgcgtaacgaagcgattgtggtgttcatgctgaccatcgcgacgctgattagcatcacctgtaaaattgataccagcgaagtgctgaacgccagcaccttcaaatccggtatgagcgcctgcgtgtgcgtactgggtgtggcgtggcttggtgataccttcgtgaaagcgcacatcagcgatatccagaccgtcgctggtgacctgctgcacaactatccgtggctgctggctgtcgtgctgttcttcgcggctactctgctttactcccaggcggcgaccaccaaagcgctgatgcctgcggcgctgatgctgggtgtgacgccgctgacggcaattgcctcttttgcggcggtttctgccctgttcgtattgccaacctacccaaccctgctggcggcggtggagatggacgacaccggctcaacccgtatcggtaagtacgtgtttaaccacgcgttcctcatcccgggcgtggtggcgattacgctttgcgtggtcctcggctttatcatcggcggcattgtgctgtaaacggttagccgttgtaaaaatagttaaaatcgggccgctcagcggcccgtttcattaatgaccagtcgtcttgcgtgatatagtgaagactttcgtgatgaggaggtcgacttgtgaacacgcctgatgccgttgtcgtactgtgcaccgcccctgatgaagcttctgcccaggatctcgccgccaaagtgctggccgaaaaacgggcagcctgcgtcacgctcctccccggcgctacctctctttactattgggaaggtaagctggagcaagagtacgaagtccagatgttgcttaaaaccaatctggcgaatcagcaggcactcctggactgcctcaaatctcatcatccctaccaaaccccggaactgctggtcttgccagtggttcatggcgataacgactatctctcatggctcaacgcttccttacgctgatcctgctgctttgcagcacatcagtttttgccgggctgtttgacgcgcccggccgttcgaacttcattcctgccgatcgggcgtttgttttcgatttccagcaaaaccagcacgaccttacgctcaactggcaggtgaaagagggctattacctctatcgcaagcaggtgagcattacgcctgctcaggccagcgtgggcgcattacagatgcccgctggcgagtggcatgaagatgagttttacggcaaaagcgaaatctatcgccagcgcctgagcgtgcccgttacggtgaaccaggcggataaaggcgcgaccctgacggtgacctatcaggggtgcgcggatgccggattctgctatccgccggaaacaaaggtggttccgcttagtgaggtgaaagcgtcgcccacgatttcacctcttccttcaggcgagaagcatgaggataccgctgaccttccgttctccgcgctgtgggccttactgattggcattggcattgcctttaccccctgcgtgctgccgatgtatccgctcatctctggcatcgtactgggcggcaaacagcgcctttccaccgcacgcgcgctgctgctggcctttatttacgtgcagggtatggcgctgacctacacggcgctcggccttgtggtcgccgctgccgggttgcagttccaggccgcgcttcagcacccgtacgtgctgattggcctgtcggcgatatttatcctgctggcactgtcgatgtttggcctgttcacgctgcagttaccgtcagctctgcaaacccgcttaacgctgatgagcaatcgtcagcagggtggttcggcaggcggcgtgtttatgatgggggccatcgccggactgatttgctccccttgcaccactgccccgctgagcgccatcctgctctatattgcccagagcggcaatctttggctcggcggcggtacgctgtacctttacgcgctgggcatgggcctgccgctcattctggtcacggtttttggcaaccgcctgctgccgaagagcggcccgtggatggagacggtgaaaaccgcatttggttttgtgattctggcgctgccggtgtttctgctggaacgcattacgggtgacgtatggggcactcgcctgtgggcgatgctcggcgtagcgttcttctcctgggcatttatcgtcagtctgggggccaaaaaagcgtggatgcgcctggtgcaaattctcctgctcgccgccgcgctggtgagcgtgcgtcctctgcaggattgggcgttcggctcgccggtcggccagacgcaggcgcatttgaactttatgcagattaagaacgtcgatgagctcaacagcgcgcttgcgcaggcgaagggcaaaccggtgatgctcgatctctatgccgactggtgcgtcgcctgcaaagagtttgaaaaatacacctttagcgatccacaggtgcaaaacgccctgaaagagacggttctgctccaggcgaacgtgacagccaataatgcgcaggataaggctctgctgaagcatcttaacgtgctcgggctgccaaccattctgttcttcaatcaacagggtcaggagcagccagaacagcgtgtaaccgggtttatggatgcagcggcatttagcgcgcatttgcgcaatcgccaaccgtaaacaacactttaaacggaacataccgttgggaatagcggaggagataaccgtgcaacgtgaagacgtactgggacaagccctgcaattacttgagatttatgggatcgccagcaccacgcttgagatggtagccgaccgtatcgattaccccctggatgatcttaagcgcttctggccggataaagaggcgctcgtttatgatgctctgcgctatctcagccagcaggttgatatctggcgcaggcagctgatgctgaatgaagaactgactgcggaacaaaagctgctggcgcgctataccgccctgacggaatgtgtcagcaacaaccgctatccgggctgcctgtttattgcggcctgtacgttctatcccgatcccgaccatcctgtccatcagttggcggatcagcaaaaacgggctgcgcatgacttcactcacgagttgctgacccgtcttgaagtggatgacccggcaatggtggcgaaacagatggagctggtgctggagggctgcctgagccgcatgctggtgaaccgtagccaggccgatgtggatacggcgcaccgactggcggaagatattctgcgctttgctcagtgccgtatgggcggggcgttaacgtaagcgaacctgttaaatttgacgtattcgacgcgtaaaccatcagattgccgcaaagttaagcaattgaacagcttttcccgaaataatgttgacgataaggcgcgattgcggtttaatgcgcttaagtgaagaggccatccggaaggacggcctttttgcgtttatgcgccaaaaaacggtaggccgggcaagtcagaccgcactccacgccacaataaactgcgcaatcccgtccacatcatttaaatccagcaccggaacctcaagttccactgccacatcgctggccaccgcaatcacatgctcatccagcgttaactcgctcaaatcatgcccggcatcgcttctgaaaagtaggagcttaggcacggcctcatgcttaaacccctcaaccagcaccagatccagcgtggaatgatccatccggctaaccagataagcgagattcagcggcgcctcatccggcgtttctgtcattaacgcccagcgctgaggacttgctaccatcgtttgtgctgctcctgccttacgcagctcatagctgtcttttccgggcgtatcaatgtccatgttgtgatgactatgcttaatcaaaccagggcgaagccctctggcacaaagcgcaggaatgagctttttcaacagcgtggttttcccggtcccactccaggcggaaatggctacaacaggtatcatcttttctcctgcatcatctgcaaatcttcactcgtatttacgttcacaaacgctgattttacatcgctaaaatcaacggaatggcctacagactcacgcataaagaccatcactctgcgctctcccgcggccaggtaggcctgcagagcaggcgctagcgatcgatgcatcaacgcgatagcaggatggtcacgctcgccgtcatgcacccaaaccacaggagccgtaccacgaagcaggaacagacgctcgacaagacaggacggaataaacggggtatcgcaggggcagaagatgaaccactctccgtgcgactgttgcatgactgaaagcataccggcaagcggccccgggtaattctcaaggctatcctgataaacggcgtacccgctttgccggtaagtgtcgatatgccggttagcgctgatggccattgccgtcacctggccggcgagcgtatcggcgacatgctgccacaagggttttccattaagaagctgaagccccttatctttaccgcccattcgtgttgctctgccgcctgccagaacgaccccgatgatttcctggctaacattcacgaatatcgcctcttttattgtgggattgaccctgctaacgtgtcactctaaatgaaaggagcaccaccatgaaatgtaaacgtctgaatgaagttattgaactcctccagcccgcctggcaaaaagagccagagctcaatctgatgcaatttttacagaaactggcaaaagagtcaggttttgacggcgatctggcagacctttctgacgacatcctgatctaccaccttaaaatgcgcgactctgccaaagatgctgttattcctggtattcagaaagattatgaggaagattttaagactgcattgctgcgcgcccgaggcgtaattaaagagtaaaagcttgtaagcggcggcaccgaaatcgccacaagatgatatcctgaatcattcgtataatttccggatgatcggatgaacgaccaggcttttactttccagacattacacccggacaccattatggatgccctgtttgaacagggtattcgggtggattccgggctaacaccgttaaacagctacgaaaaccgcgtctatcaatttcaggacgaggatcgtcagcgctatgtcgtaaaattctatcgtcctgaacgctggtccgctgaacaaattcaggaagagcatcagttcgctcacgatctgctggatgacgatgtccccgttgccgcaccgctgaaattcaataaccaaacgctccttacgcacgaagggtattactacgcagtattcccaagtctgggtggccgtcagtttgaagcggataatatcgatcagatggagtgggttgcccgctatcttgggcgtatacaccagacgggacgcaaaaaagcctttattgcccgcccgactatggggattcaggaataccttcttgaaccgcgcacattattcgaaacgtctgcaatgatccccgcagcgctaaaggatgatttcctcaacgccaccgataagcttattgctggagtgaaaacctgctggcgcgatgatatttccgtcctgcgcctgcatggcgattgtcacgccgggaatattctctggcgtgacggcccgctgtttgtcgatcttgatgatgcgcgtatggggccagcggttcaggatctgtggatgttgctcaatggcgacaaagccgagcagcgcatgcagcttgaaaccattattgaagcttatgaagaatttagcccgtttaattcagacgaaattgccctgattgagcctttacgtgcgatgcgttttgtttattatctcgcatggttaatcaggcgttgggacgatccggcatttcctcgtaatttcccgtggcttaccggagaggattactggcgtagccagatatctacatttactgagcaggttaaggttcttcaggagccccctctgcaattaacgccgatgtattaatggacacacccaggagagagttaatcatgaaaaaaatttggctggcgctggcaggtatgattctggcatttagcgcttctgctgcacagtttaccgacggcaaacagtacatcacgctggagaagccggtcgctggcgagccacaggtactggagttcttctcgttctattgcccacactgttaccagttcgagcaggtgttgcatgtctctgacaacgtgaagaaaaagctgccggaaggcacaaaaatgaccaagtaccacgtcgagttcctgggcccattgggtaaagacctgactcaggcatgggcggtggcgatggcactgggcgtagaagataagatcacttcgccaatgtttgaagccgtacagaaaacccagaccgttcagaccactgcggatatccgtaaagtgttcgttgatgccggcgtgaaaggtgaagagtacgatgccgcatggaacagcttcgtggtgaaatcactggttgcccagcaggaaaaagcggctgctgacctccagcttcagggcgttccggcgatgtttgttaacggcaaatatcagctgaacatgcagggcatggacaccagcagcatggatattttcgtacagcagtatgcagataccgtgaaatacctggttgagaagaagtaatttcgctgatgtgaaaacgccggtcactgaccggcgtttttgtatgaagattttatcttgtctatctgttcgtctttctctttccagagcgtattaagccactgctggaaacgacgtttgaagttcttatcgtttacgtaatcaccgtgcagttcagcgtcaatcgggaccaggtcgacgtgcacgacaatacgcgtcagtttgccgctgagcatatcgaagaacggcgtcttatcgttttccggatagcagagcgtgacgttaagaagtttatcgaactgtgctcccagcacgttaagcgccatcgcaatccccgctgcctttggcggcaacagatgctgatacggagagcgcgtttgctggcgcttctcttccgtaaaccgggagccttcaacaaagttcacgatggtcgtcggatgcgcacgaaacttttcacaggagcggcgcgtggtctccacatccttaccgcgacgttccggatgacgaatcaaatagctgcgcgaatagcgtttcataaacggcatatcgagcgcccagcaggccagcccgataaaaggcacccaggcgagctgctgtttcaggaaatatttgttcatcgggatgtgtttgcgaaaaagcacgcataacaccacgatgtccgcccagctgtggtgattgcagatcagcaggtaccagttctttttgttaaggttctccagccctttgacatcccacttcaggtgcgggttaaggcgcaacaggatcgccagtccttcgcaccagcaatacatcatgaaattacaaaatgcggacacggctcgccacaccacgggtacaggcagcagcaatttaatgatcccggcgagaatgatcggtacggaacaggcgatcgtcaccaggatagttaaaatgatgcttagcagtaatgttattgcagcgagaaatctcgacatgatgagctttttcaggtagttagctgtaattgagcgaccggctagtcgacgctgggcgctgattttaccagaaaacagacaaatgaatggcgctttcacagggtgatttggcggctattaccccggcgcagaatatttcgctgtcgttctgcgtaaatcaaggcttatatccacatagactaaattgccatcagttggccatatagaggcgatctcataacataactatctgataattaagatataaatattgcattatatgtaatttttacgtctgttattcatatgaagtgaaaatactcacaaacttatccacagtttgatttttacgagcgatcctcacgatcgcaaaatcttttcctgtatcgggcctgaataactgatgttttcatccttctgtggcatcctttacgcataaattgattaaaggcacggacattatggttcagatcccagaaaaccctcttattctcgtcgatggctcttcttacctgtatcgggcgtaccatgcgtttcctcctctgaccaacagcgcaggggaacctaccggcgcaatgtatggtgtgctgaatatgctgcgcagcctgatccttcagtatcagccaacccatgcggccgtcgtgtttgatgcgaaaggcaaaacgttccgcgacgagttgtttgaacattacaaatcccaccgtccgccaatgcctgacgatctgcgtgcgcagatagagccgctgcatgcgatggtgaaagcgatgggtctgccgctgctggccgtttctggggttgaagcggatgacgtcatcggtacgctggcgcgtgaagccgaaaagatgggtcgtccggtactgattagcaccggtgataaagatatggcgcagctggtgacgccagggattaccctgattaacaccatgaccaacaccattcttgggccggaagaggtggtcgcaaagtatggcgtgccgccagagctgattatcgatttcctcgcgttgatgggcgactcctcggataacattcctggtgtccctggcgtcggtgagaaaaccgcgcaggcgctgcttcaggggctgggcgggctggatacgctctacgcggaatcagacaaaatcgccagtctctccttccgtggtgccaaaaccatggctgggaagctggaagagaacaaagaggtggcttatctctcttataagctggccacaatcaaaaccgatgtcgagctcgaactgggctgtgaacagctggaagtgcagcagccttctgcggacgagcttctaagcctgtttaagaaatacgaatttaagcgctggaccactgacgtggaagccggtaaatggctgcaggcaaaagggacaaaaccttccacaaagccgaaggagacgattgtcgttgatgcagaagagcaggcggaagaagaagccgtggcgctttccttcgacaattatgaaacccttcttgaagagtcacagctcattgcctggatcgagaaactgaaaaaggcgccggtctttgcctttgacaccgaaacggacagtctcgataacatctctgccaatatggtaggcctgtcatttgcgacagccccaggtcatgcggcctatgttcccgtggcgcacgattacctggacgcgccggaacagatctcccgtgaacgcgtgcttgaactgctgaagccgattctggaagatgaaaaggcgctcaaggttgggcaaaacctcaagtacgaccgcggcattctgcaaaactacggcattgaactgcgcgggatcgccttcgacaccatgcttgaatcctacattctggacagcgtcgcgggccgtcatgatatggattccttatctgaccgctggctcaagcacaaaaccatcaccttcgaagagattgccggcaaagggaaaaatcagctcacctttaaccagatcgctcttgaagaagcagggcgctacgcggcggaagatgctgacgttacgctgcagctgcacctgaagatgtggccaaaactgcaaaagcacgaaggtccgctgaatgtgttccagcatattgagatgccgctggtacccgtgctgtcccgcattgaacgcaacggcgtgaaaatcgatccaacggtgctgcataaccactccggggagctggcgcagcgcctgaccgagctggagcagaaagcgcatgagcttgcaggcgagccgtttaacctctcttcaccgaagcagctgcaaaccattctgtttgaaaagcagggcatcaagccgctgaagaaaacccctggcggtgcgccttcaacctctgaagaggtgctggaagagctggcgctggactacccgctgccaaaagtgattctgcagtaccgtggtctcgcgaagctgaagtctacctacactgataagcttccgctgatgatcaacccgaaaacgggccgcgtgcacacctcatatcatcaggctgtcgcggcgaccggtcgtctctcgtcaaccgatcccaacctgcagaacatcccggtacgtaacgaagagggccgccgtattcgccaggctttcatcgcaccagaggattatctgattgtctctgctgactactcgcaaattgagctgcgcattatggcgcatctgtcccgcgacaaaggcctgctgaccgcgtttgccgaagggaaggatattcaccgggcaaccgcggcggaagtcttcggcttgccgctggacagcgtgaccaacgaacagcgccgcagcgctaaagcgatcaacttcggtctgatctacggcatgagcgcgttcggcctttcacgccagctcaatattccgcgtaaagagtcgcagaagtatatggatctctacttcgagcgctacccgggcgtgctggaatatatggaacgtacccgcgcgcaggcgaaagagaaaggttacgttgaaaccctggacggccgccgtctctacttaccggacatcaaatccagcaacgcggcgcgccgcgcgggcgcagagcgtgccgcgatcaacgccccgatgcaggggaccgcggcggacattattaagcgtgcaatgatcgccgtggatgcctggctcgagaaagagaaaccgcgtgtgaaaatgatcatgcaggtacacgatgaactggtatttgaagtgcacaaggacgacctcgacgctgtgtcgaagaagatccacgaactgatggaaagcagcatgacgctggacgtgccgttgctggtggaagtgggaagtggtgaaaactgggatcaggctcactaagggttcttcgcataacgcgctttttatgtaagtttgcaacatggcaacgcgcgttttgtgacgatcattagaattccctatgtaaagaatgaaaaaaaactacaaaaagtgctttttctgcaacacaaaaaggggtagagttatcggcgtagggtacagaggtaagatgttctatctttcagaccttttacttcacgtaatcggatttggctgaatattttagccgccccagtcagtaatgactggggcgttttttattgcggcaaagaaatgttccggcaaaaaaaagcgcggccattgccgcgctcggtatcactcttcttccgcttccgtcgcgggttccagctcgctaaaccaggtgtcgagcttctgacgcagcttgtccacgccctgctttttcagcgaggagaacggctcaacctgcacatcgccgttgaacgccagcaccgcttcgcgaaccatattcacctgcgctttacgcgcgccgcttgccagcttatcggctttcgtcagcagcaccagcacggcgatatcgcttgccaccgcccagtcgatcatctgctgatcgagatctttcagcgggtggcgaatatccatcaataccaccagacctttcaggcacatgcgtttttcgaggtattcacccagcgcacgctgccatttgattttcatctcttcgggtacctgcgcataaccgtaccccggtaagtcgaccaggcgtttgccctctgcgacttcaaacaggttgatcagctgggtacggccaggtgtttttgaggtacgcgccaggttcttctgattggtcagcgtattcagagcgctggatttccccgcattagagcggccagcaaaggccacttcaataccggtatcagaggggaggtggcgaatatcgggcgcactggtgacaaaatgcgtctgttggtagttccaggtagtcacgtggtcgtctccaaaaatcgtaatctgagggggattatacctgaatgcgggcaaaagacttttttcattgcactcagcctgtaggcttaagccctggccgctgtgagagattggctatacgtactatgggagatttcagagaaatcgcaggagcaagaaaaaggcaaactgttttaaatcatcatcttatttccaggtaattatctgaaaatccgtttttgtaccgtttcgttgcttgttagtttaagcgaacacggtaaagtatgcggcaaggcgaggaagccaacaggatgatgacttaaggataagggtcaggagcgccaggaggcgaagacgcaggattgtcaggacgaccagcgcctggaggcgttttaacaggaaatggaaccgtatcacggacggtattagccaagggataaacagggtttgttgttggcaaacatggaatgtctgacccgttaagggttgtgagtcaggaaaaaaggcgacagattgctctgtcgccttttttctttgcttgctttctgctagatttcgccgcaattctatactgaagaaaacgacttaaagataaaacatcatgaaaaaaccaacctccgctgcgggcgcgaaacgccctgcaaaagcacgccgcaaaacgcgcgaagaactgaaccaggaagcgcgcgaccgcaaacgcgacaaaaaacatcgcggtcatgctgcgggtagccgtgccaacggtggtggtgcagcgggcgcttctgcaaaaagcaagcagcagaaagatcctcgtatcggcagtaaaactcccattccactgggcgtgacagacaccccggtcactaagcagcacaaaccaaagagcgagaaacctatgctttcaccgcaggctgagctggatttgctggagaacgatgagcgcctggacgcgctgctggaacgtcttgaagagggtgaaaccctgaccgccgaagagcagtcatgggtggatgccaaactggatcgcatcgacgagctgatgcagaagctgggcctgtcttacgatgatgaagacgacgaagaagaagacgagaagcaggaagatatgatgcgtcttctgaagggtggaaactaacatttgcacccggcaggctcgatagtcctgcttataacccttccggttatatgttatctggtgtggttattcgttaaactacggcggttgtcgcggcgacagaagtggctgcgcacccgaatgatggcccgcaatggggtcagaacgggccgccgtatacgaacgcgacaccaacggaaggagtgagcatgtcagcaccaactatcgactgggatttggccctaatccagaaatataactattccgggccgcgttatacgtcataccccaccgcgctggagttctccgatgccttcggcgaggaggattttcagcaggctgtcgcgcgctatcctgagcgtccgctgtcgctctacgtccatattccgttctgccacaagctttgctacttctgcggctgcaataaaatcgtgacccgccagcagcataaagccgaccagtatcttgacgcgctcgaacaggaaattgtgcatcgcgcgccgctgtttaaaggccgtcacgtcagccagcttcactggggcggcggtacgccaacctatctgaacaaagcgcaaataagccgcctgatgaccctgctgcgcggcaatttcagttttaacgacgatgctgaaatctcgatcgaagtcgatccgcgcgaaattgagctggatgtgctggatcacttacgcgcagaaggcttcaaccgcctgagcatgggcgtgcaggacttcaataaagaggttcagcgtctggtgaaccgcgagcaggacgaagactttatttttgccttactcaaccatgcgcgtgacatcggtttcacgtcgaccaatattgacctgatttacggcctgccaaagcagacgccggaaagcttcgcctttacgctgaagcgcgtggctgaactcagtccggaccgcctgagcgtctttaactacgcgcatctgccgacgctctttgccgcccagcgcaaaatcaaagatgccgatctgccttctgcccagcagaagctggatatcctgcaggaaaccatcacctcgctgaccgacaccggctatcagtttatcggcatggatcactttgcccgtcctgatgacgagctggccgttgctcagcgcgaaggggtactgcaccgcaacttccagggctacacgacccagggcgataccgatctgctcggcatgggcgtctccgccatcagcatgatcggcgactgctacgcgcagaaccagaaagagctaaagctgtattaccagcaggtggatgagaccggcaacgcgctgtggcgcggcatcgcattaacccgtgacgactgcatccgtcgcgatgtgattaaggcgcttatctgcaacttccgtcttgatttcagggacgtggaagcgcagtgggcgctgaacttcagcgattatttcgcggaagatctgaagctgctggcgccgctggcgaaagacgggctggtggatatgtcggagagcgcgattgaggtcacgccgaaagggcgtctgttgatccgcaatatctgcatgtgctttgacgcatacctgcgtcagaaagcgcgtatgcagcagttctcgcgggtgatttaaacggtaatgccgggtggcggcttcgccttacccggcctacaaaagtgcgaaatgtaggccgggtaagcgaagcgccacccggcttttcatcgccaactcgctagctaaacagcccaaccagcgccgcacacagcaccgccgcaacggcggtttgtggcgtgtggctttcagcggctccgctagagagcatattcacgaatgtttccagcatgatgttcacccccaatttccgggcacgatcatacaaaactcatcggaacagtaaagcgcaaaataacggcaatttgcgctcaattaataacctttacacaagcgcggatattactccattcccagctctttcagcttgcgcgtcagggtattgcgtccccatcctaacaggcgagcggcttcctgcttatgaccctgggtatgacgaagcgcggtggtcaacagcgtacgctccatctcaggctgagcctcagacagcaggttttgatgaccggaacgcagcgcgcggtcggcccactgcgccagcagcgtcgcccagctgtccggcagcgcgtgtccgctactgctttccggcgcggtcgcctcaaacagctcggccggtaaatcctgaatcagcacttcctgaccggcagccatcacggttaaccagcggcaggtgttttccagctgacgcacgttgcccggccacgccagacgcgtcagagcggcatcggtttccgggtgaagctgcttggcttctacgcccagctcgcgggcagccacctgcaggaaatgacgcgccaggcggggaatatcttcccggcgttcacgcagcggcggcagatgaacgcgaatgacgttcaggcgatggaataaatcctcacggaatttgccttcctgcacgcgctgctccaggttctggtgggtcgcggcgataatacgcacgtccaccttcaccggcgcataaccgcccacgcgataaaactgcccgtcggccagcacgcgcagcagacgggtctgaacgtccagcggcatatcgccgatctcatccaggaacagcgtgccgccgtcagcctgttcgaagcgcccctggcgaatggtatttgcgccggtaaacgcccctttttcgtggccgaacagttcggattcaatcaagtccttcgggatcgccgccatattcagggcgataaacggcgcttttgcccgcgggctgtggcgatgcagggcatgcgccacaagctctttaccggtgcccgattcgccgttaatcaagacgctgatggaggagcgggacagacggccaataatgcgaaacacgtcctgcatcgccggcgcttcgccgatgatgtcggtggttggcccaaaatcgggcgcgtggcgcggctgctgctgctcctgataatggctaatcgcgcgctcaaccagcgccaccgcttcgtcgatatcaaacggtttgggcagataatcgaatgccccttgctggtaagcgctcaccgcggcatccagatcggaatgagccgtcattatgatgaccggaagcatagggtggcgttgtttgatctgctttaacagcgccagcccgtccatgcccggcatacggatatccgacagcagaacatcgggcgttttagtggtgagtgcgtcgagcacttcgctgccgctctcaaacgtcgtgcagcttaatcctgcccctgtgagcgcgcgttcaagcacccaacggatggagctatcgtcatcgactacccagactatccctcgttgcataaacgtcacctttattttttaatcggcaggaaaaccgaaaactcggtatgtcccggccaactggtaaattcaatttttccagagtgttggtcgatcaaactgcgggcaatggataagcccaggccggttccgccttcgcggccgctgaccatcgggtagaacagagtgtcctgaagatgcgatggaataccggggccgttatcctcgacgtcgatacgggccgcaagccgatagcgcacgccgtgtaacgtgagctggaaggcggtacgggtgcgtaaaataatctcgcccccttccggtccaagcgcctgcagggcattgcgcacaatgttcaacaggacctgctcaatctgatccgggtcatgggccagttccggcaggcttgggtcgtaatcacgcaccagcgtgacgttctctggcagctccatcgagacgagcttcaccacccgctcggccactttatggatgctttctgtgacgtgcattcccggctgctgtggcccgagaagacggtcaaccagattccgcaggcggtccgcctgctcgatgatgacgttggtatactccgccagcgcagggtcgggcagcgccttggtcagaagctgcgccgcgccgcgtaacccacccaacgggtttttgatttcatgcgccaggccgcgcaccaggtctcgggcggcaatttgctgcgcatgctgaagctgctcctggctcaggcgacgctgattatccatcggcgccatttccagcaggatcaagccttcgggaagacgttgcgcggtcagcgacagaatgtgcgagcgcccgtcgatcaccagcgtcacttcgttatcggtgaaaccctggcccgcctgtaaactttcctgcatcaggccaatattcagcgaaaaatagctcagaagttccggaagcggggtgccgaacagtttgcgtgcgctttgggcgagcagctgctgtgccgccgggttggcgtaatgaacggccagctcgtcatccaccagcaaaatgctgttaatcaaagaattgaggatctgcccagcatcgggcagcgtgccagttgccattcagcagtctcctggagtcgtttgcactaatttagtgcagtatagcgttttcggcgtcaaaagcgcgtgagatcaggttgttggtggagaaaaaagcccatccggagatgggctaaaagtttccacggcaactactcccggcgcttgtcacgccgggtaaaacaacttaattaaacgctgtagtacagttcgaactcaaccggatgcggagtcatacggacgcggtcgttctcttcagtacgcagggcgatgtaagcatcgatagcgtcgtcagtgaatacgccacctgcggtcaggaactcgcggtctgcgtccagcgcctgcagggcttcttccagagagccagcaacctgtgggatctctttcgcttcttctggcggcaggtcgtacaggtttttgtccatcgcttcgcctgggtggatcttgttcttgataccgtccagaccggccatcagcagtgctgcgaagcacaggtatgggttagccgctggatccgggaagcgaacttcgatacgacgcgctttaggagacgccaccaccgggatacggatagaagcagaacggttacgcgcagagtaggccagcatcactggcgcttcgtagcccgggaccagacgcttataggagttggtggttgggttcgccagggcgttgatcgctttagcgtgtttgattacgccgccaatgtaatacagcgcctgctcggacagaccggcatatttgtcaccagagaacaggttggtaccgttcttggacagagacatgtggcagtgcataccggaaccgttgtcgccaaacattggttttggcatgaaggtcgcagttttaccgaaacggtgcgcaacgttgtgcacaacgtatttgtagatctgaatttcgtccgcttttttggtcatggtgttgaagcgggtagccacttcgttctgacccgcagtcgccacttcgtggtggtgagcttcaacaaccaggcccatctcttccatcaccagacacatggtggaacgaatgtcctgtgcagagtcgaccggaggaaccgggaagtaaccgcctttcacgcctggacggtgacctttgttaccaccttcgtatttggtggaggagttccatgcgccttcgatgtcgtcgatagccacgtgggagccagagatagaggcaccaaaacggatgtcatcgaacaggaagaactctggctctggcccgaacagaacggtgtccgcgatgccggtagaacgcaggtactcttcagcgcgtttcgcgatagaacgtgggtcgcggtcgtagccctgcagcgtgcctggctcgaggatgtcgcaacggatgatcagggtaggttcttcgaagaacggatcaatgaccgcagtggttgcatctggcatcagaaccatgtcggattcgttaatgcctttccagccaccaatggaggagccgtcaaacattttgccttcttcaaagaattcggcgttcacctgatgagcagggattgtgacgtgctgttctttacctttggtgtcggtgaagcggagatcaacaaacttcacttcatgttcgttcagcatcgtcaaaacgtgttcagcggacatacttaactctccagattggtcattgtcgtcgtggtaacgaggtcttcagtttctgtttgtactggctgttgccatgtaatttttataaagcgaaatctgtgccaacttttaaaacaccccaaaaaggcgttatcatgcgcaccatagtgcaaaagggctgcaccacaatggtaatgttgcaccagtatagtgcttcagtgtgaacaccgagcaccatattggtgcaattttcgttaaagtgccctttttcgctccgtgaaagcgatcacaaagcatctctgcgatacttgtttgcggaggatgtttgtgatcctgttttgtagtgcgattaatccgtgtacaataacgcgctatttctaatgcctgaggcaaagttgtgatcgaaaatttgcgtaacatcgccatcatcgcgcacgttgaccatggtaaaactaccttggttgataagctgctgcagcaatccggtacgtttgatgcacgtgccgaaactcaagagcgtgtgatggactccaacgatttggagaaagagcgtgggattactatcctcgcgaaaaacaccgctatcaaatggaatgactaccgtatcaacatcgttgataccccagggcacgccgacttcggtggtgaagttgagcgcgtgatgtccatggtggattccgtgctgctggtggttgacgcatttgacggcccaatgccgcaaacgcgcttcgtgaccaaaaaagcatttgcccatggcctgaaaccaattgttgttatcaacaaggttgaccgtcctggcgcacgtcctgactgggttgttgatcaggtattcgacctgttcgttaacctcgacgcgaccgacgaacagctggacttccctatcatttacgcttcggcgctgaatggtatcgcgggtctggaccacgaagatatggcggaagacatgaccccgctgtatcaggcgattgtcgatcacgtaccggcaccggatgttgatctggatggtccactgcagatgcagatctcccagctggactacaacaactacgttggcgtcatcggtatcggccgtatcaaacgcggtaaagtgaagccaaaccagcaggttactatcatcgatagcgaaggcaaaacccgcaacggtaaagttggtaaagtgctgactcacctgggtctggagcgtatcgacagcgatctggctgaagcgggcgacatcatcgcgatcaccggtctgggcgagttgaacatctctgacaccatctgcgacccgcagaacgtggaagcgctgccagccctgtctgttgatgaaccaaccgttaccatgttcttcaacgtcaacacctctccgttctgtggtaaagaaggtaagttcgttacctctcgtcagatccttgatcgcctgaacaaagagctggtgcacaacgttgcgctgcgcgttgaagaaaccgaagacgctgatgccttccgcgtttcgggtcgtggtgagctgcacctgtctgttctgatcgaaaacatgcgtcgtgaaggtttcgagatggcggtttcccgtccgaaagttatcttccgcgaaatcgacggccgtaaacaagagccgttcgaaaacgtgacgctggacgttgaagagcagcaccagggttctgtgatgcaggcgctgggcgagcgtaaaggcgacctgaaaaacatgaatccagacggcaaaggccgcgtacgtctcgactacgtgatcccaagccgtggcctgatcggcttccgttctgagttcatgaccatgacctctggtaccggtctgctgtactccaccttcagccactacgacgacgtgcgtccgggcgaagtgggccagcgtaacaacggcgtactgatctccaacggtcagggtaaagcggttgcgtttgcgctgttcggtctgcaggatcgcggtaagctgttcctgggtcacggtgctgaagtttacgaaggccagatcatcggtattcacagccgttctaacgacctgaccgtaaactgcctgaccggtaagaaactgaccaacatgcgtgcgtccggtactgacgaagcaacggttctggttccaccgatcaagatgactctggagcaggctctggaattcatcgatgacgacgaactggtagaagtgactccgctgtctatccgtatccgtaaacgtcacctgaccgagaacgatcgtaaacgtgctatgcgcggtgcgaaagaagagtaattcggttatgccgtaggccgggtatgcgcatgcgccacccggcaacgaaaaagccgctgagcgatcagcggctttttttattagaacgaataccgtagccctaaacggatccggtactgctcccggttgtaatcattccatcggtccagccactgcagttcgaggtacggcagccagtttctgtcgatcctgtaactgaatttattggtaatttcccagtgatggtctttgccatttttgctgtgataatcattcacccgctggaaaaagtgcggttcaaaggtgtagaaaaatgcatccgttactttgaaattccagtagttggcaaattcgtgcgtgtcgttcttatccatctgcccgttatagtccggcgtatcgtagttgttatggttatagcgatagcggaacgtcagattaaaccagtctgtaaatttgtagttggtatctaaataaaccgcgccacccgaacctgcgctgctgtcgttaatcaacccgccgggctggaaggtgagtttatcggtcggcttaaagagcggataccacccctcgatttcgttatagctgtgcttaagttcatcccatttacccacgttataggcgttggtgaacatcagtcccgcgcccatatcgaagttataacccgcacgcaggatcacctcgtgcatctctgaggccgtattgtaggcttcacgcgtttcgacataggccccggcaaataccgggcaggacacagacgacacgatcagtacagtgatgattcttttcataatttgtccatgtatcaggtacagaaaggcctccctcctgataaacaggaaggacatagtggccggatttattgttataaagtgactgctgacgctttattgttggtggttatctcaggggtattcgcggtttgtttcttccgttttccaatctcctcgataataaaggcgaagcgcgcttcgttgagtttataaaacagccccatggtcacggcagcaacaatcgccaggccgcacggccagaggaaaatcagctgacgcaacccaagcagcgtgcccgcgctttgcacggcatggggaacgtagccaatctgggtcagcataatgccaggcaggaaaccggcgagcgcggcggagattttgcgcgagaaggtatagccggtatacaccgacccttcggcgcgaatgccggttttccactcgccgtaatcgacggtatccggcaccagcgcccagttcaggctgttcacaaacgccgtgccgaagaaggccatgcaggaaaacagcacgaacagcagggagctggtcccccagaagaaattcagcacgtcgcccaccgcccacagcgccagcccgcccagatagaccggtttcttgccaaagcgctttaccgcgccgggcaccagaaacacgccaatcagaatgcagcccatgctgaaaaagcccatccacgacagcaaatgcagatcgttcagcacgtactgggtgtaatagacctgaatcgccagcttgatgttaaacgcggcgagagtgcacaggttggcgatgcacagcaccagcagcggtggattgcggaaaatcgcgcagaatgatttcagaatgccgggcttatggtgatcgggtgtgagctccacgtagcgttctttcaccccgctgtagcaccaccacatgcagaacaggccgccggtaacgaacaccagcgcggccaccagatagccgagtgagggctggtggacgaacagcgcctgaatgggcataaagccgacggtgcagagcaacagtcctaccgttgcgccgccctgacgccacgccgcaagctgcgcgcgctcgttcgggtttttggtgatggccgggaccatcgcaccgtaggcgcagttcatcaggctatagcagaggccaaacatcatgaagagcacggtggcgagggccgttttcaccgtcaggctaaagtcgttggccataaactgcgccgtcgccaccagcgccaccggaacggaggcgtaaagaatgaacggcctgaattttccccgcgcgccgatgttacgtcgggagtcgagcagcaccccggtcagcatgtcggtaaaggcggtgaaaaactttgccaccaggaaaataatgccgccgtagaacgccggcatgcccagttcatcggtgtagaacttcagcagatacagcgtgccaatacacagcatcaggttcgagccaaaatcgcccatcccgtaggcgcacttctctcgcaggctcaatttgagggttaacggatcagtattatgtgtcatggtcgatcctcaaagcgccccgcagggcgctctatcacgtcattatgccgtacgtttgcgcagttcgatctcttcgacgatgcgcacatacatcttctcgttgaggttgtagaagcagcccatcgccacgatggtgataactgccagcaggctcgggtagataaatatcagctgccgcagcccttcaaccgtgccactggattgcaccacgttgggcacatagccgatctgcgtgagcatgatccccgggaagaagcccgccagcgcctgggagaccttcctgaagaaggtaaaaccggtatagaccgtcccctctgagcgcacgccggtgcgccactcgccgtactccacggtatcggacaccagcgcccagttcaggctgttcacgaacgcggagccgaaaaaggccaggcaggagaacgccacaaagctcaccgagccgccgccgaagaagtagttgagcagatcgcccgccacccaaatcatcagcccgctgatgtagacctttttcttgccgaagcgccgcaccgcgccgggcatcataaagacgccgataaaaatgcagcccatgctgaagaagcccatgtacgacagcaggatcgggtcgttcagcacgtactgcgtgtagtagacctgaatggcgagtttgacgttaaaggcgcccagcgtgcacaggttggcgatgcacaggataaacagcggacggttcccggcgatggcgcgaaacgactgcagcagccccggtttttgcgccgggttagcgggctgcgcctcgacgtagcgttcggtcacccccttgtagcaccaccacataaaaaacagtccgaacagcgagaagagggtggcggcaaagatatagccaagctggtcattgccttcaatcaggttcatcaccggaacaaaacccacggtacagagcagcaggcccagcgtagcgccgccctgacgccaggcggccagcgaggcgcgctcgtccgggtttttggtaatggcgggcaccatcgcgccgtaggagcagttcatcatgctgaagaacaggccgtacagcatgaacagcaccgtcgccatcaccgttttaccggtgatttcaaacggcgtgccaacgaagttggcaatcgccagtaaggtcaccgggaacgccgcatagagtacgaacgggcggaatttccctttcgggccaatcttgcgccgggagtcgagcatgatcccggtgcccatatcggtgaaggcggtaaagaacttcgcaatcaggaagataattccgccgtaggtgcccggcaggcccagcacgtcggtgtaaaacttcagcagatacagcgtgccgatatccagcaggatgtttgagccgagatcgcccatcccgtaggcgagtttttctttaaacggcaggcgtagggttgccggatcggaagtatgttgactcattattgttctccgtctgcccgcaggtggccccgcgggcgagccttatcagatatgacgtaaggtgctaaacagatctgcccattcgctgtgctggcggtagaagaccggcggcttgccgagcggggcatctacggtcacgtcaccgccccggcagatttccccggtccacgcattcacccagctgtcctgcggcagatagagcgaccagtcgcggcgcccctcttcatgaaccggcgccaccagcaggtcgcggccaaacaggtactggtatttcagcgtgtaggcgcgcgcgtcgtcctcgtagtgcaggaacagcggacgcatcaccggcaggccgcttttcgcgttctgcgcgaccgcagctttgatgtacggctttagggtggtgaagacggttgtcatgcgcgcgaagtgcgcgatggtttccgcgtcgccgtcgaactgccagttgtcgccgggacggttgccctcatgggtacgcatcatcggcgtaaaggcgctgaagtcgcaccagcgcagcagcagctccttgctgcgcttcatctcgaacagggtcgtatagccgccgatgtcgctgtggtgcaggccgtgcccggtcatcgccagcgacagcgccgcagggatgacggacgctagaccgtcgtccaggctccagtcgacgttctgatcccccgcccacatcatcaccgagtgcttctggctgccggtatagcccgcgcgcatgaagaacaggatctcgccgagcttgccggtctcctgaagcgcttcgtagttacatttggcccacagggcaggccaggcgttatgcatgatctccgcgctcacgccgttatgcaggaaggtgtcggtcggcaggtactccccgaaatcggccatccagccgccgcagcccagttcgatcaggttctttttaatgacctctttgtaccagtcgtaggctgccgggttggtcaggtcgataacgcccgcgtagaactcgccgaactcgacgtggtagtcctcgccgttggcgtttttggtcagatagccgcgtttcgcggcctcttcgcagagatctttatcgctggcgacgtacgggttgatataggagaggaactgcacgccttcctctttccacttcgcaatacgcgcatcaagctgcggatagagcgcgctgttccacttccagttccacattacgcgtttgccaaaggaggtcatgcgaatgccggaccagtcctgcgcccagatgccgttgaccttcacgccgccctcgcgcatggcgtcgagcttctgctggcacacctcggtgccgccctgaatgcccagcgtcacgccgtcgtacacccagtccggcagctccggctgacgccccagcaggccggtcagtttttccagcagatcgacgtacgtttccgcacattcgaagcgcagcgtggcgttatcttcccagaacgccagctcgtggaagtccggggcgctgaagtcaaagttcatgtagcagctgttatccacgtggcagtagtacttctgggtgctcacgaaggtaggctgcgggaagaaggtccagtagtagtcgccgcccgcgttctctttgcagtcggcctgccaggtgacgtaggtctgcttattgcggccaacgccctgctcgctggtccacagcgggaacggcttgccgcgcaggtcgaaatacgagaactgctcgccgcagccgtaaatatgatcttccggctgagctgccagccgcagccagatgcggttatggctggcggcgtcatttttcagcttcagctccagacggccttccacatccacgcccaccagcagcgtcgcgcttaccgcatcgccgcgggtaaaacggatcgcccagcccgcgctttgctgcgtgacggtcgcgtccgtcagggcaatcttttcgttgagcttgtctttgatgctgaagttgccgcgaaacatctcgatatccgcctcgcctgcgccaatccacaggcaaggggcatccgcggtgtgggataaaatcagacggtcctgccagcgcagggtgaagccactttcgttatttttcaggtcaatattgtgtagggtacgcataaacactccgtcttaattatttggcctggctatccagtaatccggcggcgacggcaggggctaagcccggggccagcggcaggcgggggatcaccaggcagtgcagcaggtggtaaatatcctgcttgccgtcccagactttggtggtcacttcgttgttggtgtccagctcctgccaccacgaaccgtttttgtagtccatcaggtatttgatgcagtaatcccaccacttctgataccaggcttcgtactgcgcttcgccggtcacggtatagagggcataggccgtacccatcgcctcgacgattggccagcgcacgcgttcgcggacgattggcttgccgtcccagcccacggaatagacaaacccgtcggcgccgtcgggtgcccaggcgtcgcggatggtggcgtggaacaggccttttgcatcttccagcagccactccggcggggtttcaaagcgcgcttccagcgcggcgcgcaggtgcagcatcaggcggccccactcaatccagtgccccggcgtgccgccgtaggcgcggaagcggtgggcgggattatcaatgttgtaatcgcggatcggattccagtcggtgtcgaaatgctcgttaacgcggtactcccctttgcgcgccacgtcgtgaataatcaccgaggcgatgcgcagggcgcggtcgagccatttacggtcgtgggtcacgtcatagacgatgaggaaggcttccacggcgtgcatgttggcgttaccgccgcgatagtcttccgttttgctgaaggcctcatcccaggactccagacacatctgctcctgttcgctccagaagtaacgcccaatcacctcgatggcatcgtccagcaacttacgtgcctgcgggtgacccgtggtcacggcgctcgccgcgcccagcaggacgaagaagtgctgatagccctgcttggaggtatcaatgacgccttcatcgtttacgcaggcgtaccagccgccgtgctgcttgtcgcgcagcgggccgttgagggcattaatgccgtgctcaaccagcgcgaacgcgccggggcgccccatgttcgccgccaccgcgtaaacgtgcagcatacgcgcggtgatccacagatgcgtgcccatatcgctgcgcacctggccgttattgcccagccagccaaagccggtcggcacggcggcatttttgccgaaatcaagaatgcggtcggtctcttgttcgagccagcggttatggctcagggtgttaaaccatttcatgttcgggtcctttcttaacggcgagccatcatttcgtcgacgatctcacccagacgctgaagtttggggacggagatatcacgcagcatcagctcggtgtccggcaggccaatcacagaggaccagacggcgcgaccggctaaaaagcccgatgcccccgcctgcatggcgacgcttacggcgcgcgggaagagcttatcgtccacgccggaggagaggatcacccacggcatggcgatgttctcgttcagcttttgcgaggccgccagcagcgcctgctgcgtgcccttgccaaacagcggcatctccactttgtagaggtcggcaccgctgtcgcccagctctttggccgcgtcgataatcgcctgttcgcggttaaacgcggcaccgcgacgtggcggacgcaccaccggctcgataatgctcagcagcccgttgtcgtggcagagcgtattgaacgctttcaccatctccaggcgctgctgcggatcttcatcgctgcgccacagcaccagcagcttcagtgctttgccgccatcgcgtttgaccgcctgcgcgtcgacgttcttgtcgatcgccacgctgtcgaccggaataccgttccccggaataaactcgtcggcggccacaatcatcgcgcagctgttggccacggcctgatgctcgacaatctggcgatagcagaactgctggtcgacgagaatggcagaggcgtacggcgacagaatttttgccgcgttgaccttaaaatcggtcaggtgctggtcggttaccggtaccggcgcgcctgcggcagcaaacatcaggcgcatcgcttcgcgctgatccacggccagcatcgcaaaaccgccggaaggtcgggtgatatctttcagggtgtacatcgtcattcctcagtcctttcgtatcagtgtgtttttttcagcccggcagatgcgcgaacctgttcaagaatggccgtccagtcctcgcgcccgcgcccggcggcgcgagcctggttgtaaacttcgcgggaggccgcgcccagcggcatcggaacgtggagttggttggccacgtcgagggcgatccccagatccttgtgcgcaaggtcgatcatgaaggcgggagaaagatcccctttcagcaccttgttcggccaggatgttgtgaagtggcctttacccgcaggcgtaccgctcatgaccctgagcgccacgtcaaaggagaggccaagcgcttcgcacagcacggcggcctcggcggaaagggcgttcagggcgatgctcatgtagttattgataagcttcacgcggatgcccatgcctggcccgccggcgttaatcagctcattgcccatcgccattaagaccggggtggcgcgctcaacctgctgcgccgtgccgcctgccagcaggagcagcgtgccggcgatggcatggtcagaggtgcgcccgacaggcacgtccatcaggctgaagccacgctcagccatgtcgcggatcagcgcgtcggtttgcagcgggtgaatggtggacatatcaatgaccagtgcgtcgcgggataacccttcgcacacgccgtgctcgccgaacaggacgctgcgtaccaggtcgccgtttggcagcatggtgatcacgaattcggcgtccgttgctgcctgcgcgggcgttgccgccgcccgagcgccgctttcaaccagcgcctgaatcgcctgcgggtttacgtcaaagacgttaagctggtgaccttgtttcaacagattcttcgccattggcgcgcccatctgccctaagccgataaatgcgattgctgacatgcctttctcctgtcacatcgtgtcaatttttgcgcgtttatgttgtctgtttttgatcgtatttgtaatttatagtcaaaaaattgacacgggtcactttttaaacatttgatgaaattaaaatgaaggcatcagaaatcgcagaaggaatcaccatgactcgcatcgtttgtgtcggcattaccgtgctggatcgcatctggtatctcgatgatttaccaaaggaaggtgggaaatatgtcgcaaaggactatacggaggtgggcggcggcccggcggcccggcggcaacggcggcagtggcggcggcgaaactgggcgcggaagtggattttattggccgggtgggtgatgacgataccggcagacggctgctggcggagctggaatccctgggggtgaagacccgctacacgcgcgagtttaagggtgcccgatcgtcacaatcggcggtgctggtggacgcaggcggagagcgcgtgattgccaactaccccagccccgatctccctgcggcggcagactggctgcatgaaatcgacttctctcagtgggatattgtcttagccgatgtgcgctggcatgacggggcaaaacaggcatttaccctggcccgtcagcagggcgttccgacgttgctggatgcagatgttaccccgcaggacatcgcggagctgatcgccttaagcgaccacgcggccttctccgcgccggggctgcggcgccttacgcagcgggacgaaacagaaaattccctgagaaaagcacaaacgctcacaaatggacatgtgtatgttacgcaggggcgagacgggtgcttctggctggaaaacggcgcattgtgccatcagcccggctttgaggtgaacgtggtggataccacgggggcgggcgacgtgttccacggtgcgctggcggtcagcctggggcagcaatggcccgccgcagacgccgtgcgttttgccagcgccgtcgcagcgctgaaatgcacgaagcccggcgggcgcgcaggtatacctgactgtgatcaaacccgctcttttttgtcactttttgtataaaatgcggggcgtgatggttttcagaggacagcccatgagccttaccgaactgaccggcaacccgcgtcacgatcagctgctgacgctgattgccgatcgcggctatatgaacattgatgaactggcgcagctgctggatgtctccacgcaaaccgtgcgccgggatatccgtaagctcagcgagcaggggctgatcacgcgtcatcatggcggggcgggcagggcatccagcgtggtgaacacggcgttcgagcagcgtgaagtctcgcttaccgaagagaagcgggcgattgccgaagccattgcggactatattcccgatggctcgactattttcatcaccatcggcacgaccgtggagcacgttgcccgggcgctgctcaaccataaccacctgcgcattatcaccaacagcctgcgggtggcgcatattctatataaaaacccgcgctttgaagtgatggtgcccggcggcacgctgcgcccgcacaatggcgggattatcgggcctgcggcaacggcgtttgtgtctggttttcgggcggattatctcgtgaccagcgtgggggcaattgagcacgacggcgcgatgatggagtttgacgtcaatgaagccagcgtggtgaaaaccatgatcgcccacgctcgccacattctgctcgcagccgatcatacgaaatttaccgcatccgcggcggtagagattggcaacgtggcgcaggccacggcactcttcaccgatgagatgcctggctcggctctgcaaactcacctgaaatccagtaaggttgaaatcatcctggccagtaccagcgatgatattgcctgaagcaaaaaaagccgctgagcaaacagcggcttaaatattgttatttaaagctgtatttcacccctaacatcccctgcgtatcgctgtagcctttatcgcctatctgctgagccacgttgccccatacgctaagctgcggcgtaatctgcccctctacgccggtcttgagttcaccgatattgcgcgtaccacgcatgtcattgctgacgtcatccatgcggatacgcgtgggctgggtgttgtggatccagttcgcttcgataaacggctggaaggtccgtgatttaccgtcgtcaatcgcgttatgtccgctgatgtaggccttcacgccgagacgtgtcatcaggttgccctgagtctcgtctttcacccgcgtgccgttgcgctcgcgatgatcgtcagcctgcacgtccatccaaacggcctgcgctttcggctggatccagtagctgttgcggtcgctttcgcccaccttaacgctatagcccgctttgacagaggcggtcacgccgctggaacgataactctcagtggcctgatcctgtcccattaccttattgtcgaaccagttatacagcacccagctatcaacgtaggtgccacttttatccgcctcgtttgcgtaccaggtaccatacagaccgacgctatagccattcacttcaccgcgtgaatggtatccggtcaggctggaagcgctccggctctggctgttgccgtagcccgccatcaggccgagatgccaacggtccaggccatcggtgctccactgggcgacatcgccacccagctgcagcacgtagcgattggcggtggtttttagctggccgctgccgtctctgaaacgcgtatgaccgccgacgttacgcatccacaggctcgtcactttctgctcgccagtgagcatgtcggtgtactgcgtttcacccagacgatcgtgcaggcgggtcataaacagcgtatttgccgcatagctgtttgccagatagctaccaaattccgggcgatactgatgctcgcttttcggtggtgcaggcggtgggaccggctcttgcggcggaatcaccgggtcaacgggcggatctaccgggtcgactggtgggtccacggggtcaacaggcgggtctacggggtcgaccggtgggtcaactggatcaacgggctccgccaggctggtcagaaaccagtttttacctttttgcacaacgttatagtcataaccgcccgccacgatacggctggccttctcaaacgtcccgtcagagttgccaccaacgctgacaatttcaatcccttctacggtttgcgcgccagtaccgccaatgttgttcacttccaccccggtatgaccggacgtgttgccttcaacaatcagtttgtccgtttccgaagtgtcgtcaaacagcacggtattgaaaaccagcttgccgccgttgccgataaaatcatccttgatggtcagcgtttgccacgccgcgtcctctgcatgctgaaaattaatcgtgccgcccgcattcagcgtcaggctggtcagcgtggagttgtcgcgcagattccagacggcatcattcatcgtcagtgcgatagtaccggtacccgcggcgttgccctcaatgaaggacgccccattccacagggagttgtcatccatcgtcaacgtaatggtactgttttgtgccggaagcgtgctggtggccgcgacgccgcccgctgaaaggacatcgccgttgaggatgaatttgcctccagcggacgcgtcaattaccccgccgttactggcgttcagggcatagctaccgttgtcgcgatggcctgcggtggtaatggttgcaccacccgcgagggctatcacgccgcgtgaccaggcatacatcccgtgcggcgcttgcgcagagctgctggttttctcgctgctgtttaccgcaatggtgacgttatctcccagattcaccgcaccggtgtaagcatagacgccatgcgcgctggcaccgttggtcgtgatggtggcaccttcatcaagggtgatagttgacgagccggtagaataaaccccggaggcactggccgcgtcggtggtaatcgtcgcgcttttgcctagctcaatttttgacgcagagcccgcatacaggccataggccgatgtgccgtacgtttcgatggtcgcctcatttcccagacgaacgtaagagccgctctggttggtgcggatcccttcggcgtaggtaccacgcgtcacaatatgggcacgatcgccgacgataacgttattttttgccttcgacgcatcattcagtgcataggcgctaatcccgcgtcctgtgctgcccgtggtttcgatatagagatcgtcccccacataaatattggcggagccaagcgatccctggctgaaggagctgtagccggcattgatgccgtcaccgctttggccattaacgtaaatatgggtgcggtcgccggtaatgataaataccgggttgtccggcgtgttcataccgtgagtacgaataccgtcgacgtctttaccattattggcagccacttttgactgggtgcgaatagtcagatcgtcaccaaatatcacccccgggctgccggacgtggagttctgaataacggtaacggaatgctcaaaggcttccgccccaggcccttcgagggtgatcccatctccgtaaatcgggatattccccgggctgtactggtagacatagttaggatcgccggtatttttgctaaagttcgcgtttgccgttgcgggtatcagcgcctgtatttctgcaggcaaatccgttaccgctccggaggcaggtaaattagcaaaatctattaccgctgcatgtgcggtaaatagcgctgacgttaacgccagcgaaatcgcagcggcgactggtgagtgtttcattaaatatggcatgactgccccctttctttcaggcgtagaacatcctccacaccattaaatgtgggtaggtaaacaggttgaaattacaaaatagaaacgagaattttatgaatactgatgcctaacttcctctcaagtcgtattttatgaacataaatttttttaacatcaatgccgtctgattttataatctcctggaggcacgcacctgacaaaaatctgttcagtaacgtaaattcaacagcgttcaacatgctgccgcgtctgctatttaaccgtctcccggagaaaagatggctgattttttcctttaatataatgtcgttgtcattcgaataaataattccctttatttcactgcgctgcatgaaaaaataattggccaatgcttccagcttgcggtctgtgataatcacgatgttcatgttagttctcaccagacgttcaatccattgcggatcggcaagtacgcgcaggttgcaaaacgaaaagtctacaaatataaagccgcgtaataagtgattcttgtttccttgcaatattttattttctactgcaatctgcaggaaatggttaccaccaggccaaactgcgaatgaggcatttccacaatattgtgaacgtactgcgttatctggaaataactgacaggacaattcacagctcatacagcggacaaccttatgcgacgatgtcatcatccagtccactcctgtcttattttcactgtcaatatttcactgccatccaaatgtgtcaatcttgaaacatatctcgtgcccctctcttgtttatgataaatagtggtgaagaatataaattcctggtgatgtctattttgtcaggccgtagccatagcgaaaggacatactttggccatcgtattccaggactattcttcagccccttaagattattcgacaaaaaaaatcccgcaggacgatttacgaaatagcactaatagctaaagattcgtttcttaaatcggctgtaacgacagtcttttcgcgacttggggctcaatataatgagtgggccgggcgaagtgtaatgaaatctcattatgtcgttttagatgagagaaacctaagaaaactgtcttttaactgattgaaaaacaatgtgttattcttaatcttagttggggtggtatcgcgtcctgatccttctgacctatactgttgttaaatatacgtatatctttctggtgtatatagttaagggttgttattgctgaggaaaggaaaattgtatcttattaacaaagtggtcgagtatgatccagaaaacaaaaacctggtaaatcatattaccgggcgctcgatacaattgcagcttcctgccaacctctgttttctttatctcatcacccatcccggagaaataatttcgcaaaaccagttaatggtggtgggatggggggagcgcaatgacgtcactacgccgaataccttttaccaggctattttgacattacgcaatgccctcgctgaggtgggcttaccgcgcgatacggtaaaaacgatttcgcgtcgcgggcttatgctttccgaggctaccgaggttgaattatttgtcccaaccgctgagccagtcatagccaataaagacgtggtcgttgccaatggcgccgcaaggcagaggccagcctggctgataataacgaccgcaacgcttttgttgatcgcgcttatcaacgggggaatattatataaaaagcaccagaacatgccgtttagtcactacattcccctttcaacgggcagcacgacccaggcctgccaacttttttatgcacctaacgaacatattcaggatcattacgtgcgcctgctaaacaataatcccggtctgtgtgccgaaaaacgatacgtttttctcgtcggctatagtaaaacggagcgaatcgcggcgtttgtctgtaataacgatgcgcgaagggacgcgacggcgttatgtaccacccattatttttgggcgcacgaaaaatgatgactctccggaaccgtatcattttgctggcggcatttctggcggccgctatcaccagtggctggttagcttattcgcatttatcgagtacgccgatacgctgtacgggagatgtggaatggacgattggtaaaaaccgatttgtgggtacggtttcctggcggatgcagcatcgggaggggtctacggttattaacggtaaattatttggtcagacggttactgaagttaatcgtaccatctattttcactacagtgaccatgagaacgcgcgcgtgttaaataacaatcgtattgttaaaacctttgccgataatgcggatgaggctgatatcaacgcaacgctaccgggtttttaccgcacgccgggtagggagctgagcctgatgatcgatgagtatcggggggcctggatttttgccgcgtcaaacgtcccttcgctttactgtcgtaaaaacgcgccgtaaaaatcgatcgcacaccttagaccgcatccatagtcaaatctctttattcccgctacagttacctctccacggcgagcaggagataaacatgctttatatctttgatttaggaaacgtcatcgtcgatatcgattttaatcgcgtgttgggtgcatggagcgattttagccgcgtgccgctggcgaccttaaagcagaatttcgcgatgggcgagaccttccaccagcatgagcgcggtgaaatcagcgatgaagcattcgctgaacgtttctgccaggagatggggctttcgttaagctatgaacagttttcccacggctggcaggcggtatttgtggcggttcgccctgaggtgatcgacatcatgcacaaactgcgcgagcagggacatcgggtcgttgtgctgtcaaataccaaccgtctgcacaccacgttctggcctgaagaataccctgaagttaaggcggcggcggataagatctacctctcgcaggagatggggatgcgtaagcctgaagcgcgaatctatcaggctgttctgcaggcagagggattcaccgcggccgatgcggtctttttcgacgacaacgccgataatatagagggagctaaccagttgggtattacgtcaattctggtgaccggaaaagagacgataccagactactttgcgaagcagctatgctaaaaaccgttcatcaaaaagccacgcaccatactcgcccgctgcgggcctggctgaaactgctctggcaccggattgatgaggacaatatgaccacgctggcgggtaacctcgcctacgtgtcgttgctctcattagtgcctctggtggcagtcatctttgccctgttttccgcctttccgatgtttgcggacgtcagcctgcagcttcgtcattttgtcttcgcgaatttcattccggcaaccggggatgtcatccagaactacattgagcagtttgttgctaactccagcaagatgacggcagtgggggcatgcggtcttattgtcaccgcgctgctgttgatgtacgccatcgataacgcgctgaacacgatctggcggagtaaaaaagcgcggccaaaggtttattcctttgccgtgtactggatgatcctcacgctggggccgctgctggccggggcgagcctcgcgatcagttcgtatctgctctccctgcgctgggcgagcgatttaaacggcgtgattgataatgtgcttcgcatctttccgttgatcctgtcgtggctctcgttctggctgctctatagcgtggtgccgaccacgcgcgtgcctaaccgcgatgcggtcgtgggggcgctggtggcggcgttgctctttgagctcggtaagaaagggtttgccctttacatcaccatgtttccgtcctatcagctgatttacggcgtgctggcggtgatccccattttgtttgtctgggtctactggacctggtgtatcgtcttgcttggtgctgaaataactgtcactctcggtgtataccgcgaacttaaaaaagcagcagaagctgaaaaacaacaagaagcagaccaaccatgattgcattgatacagcgcgtaacccgtgccagcgtcaccgtggagggagaggtgacgggtgaaattggcccaggacttttggtgttgttaggtgtcgaaaaggatgatgacgaacaaaaagccaaccgcttgtgtgagcgcgtgctgggctaccgtattttcagcgatgcggaaggcaagatgaacctgaacgtccagcaggcgggcggcagcgtgctggtggtttcccagtttacgctggcagcggataccgagcgcggcatgcgcccgagtttctcgaaaggcgccgcgccggatcgtgcagaagcactttacgagtactttgttgagcgttgtcgccagcaggaaatgaatacgcaaaccggacgattcgctgcagatatgcaggtatcgctggtgaacgatggccccgtcacattctggctccaggtatgagcatacttacggcgtggccgcgggtaacaagagagagtacagctatgtatcaccttcgagtaccgcaaacggaagaagagttagaagcctattaccagttccgctgggaaatgctacgcaagccattacatcagccaaaaggctctgagcgcgacgcctgggacgcgatggcccaccatcagatggtgatggacgaagagggcaaccttatggccgtcgggcgtttgtatatcaacgccgataacgaagcgtctattcgctttatggcggttcatccctccgtgcaggacaaaggtctagggacgctaatggcgatgaccctggaatccgtcgcccgccaggaaggcgttaagcgcgtcacctgtagcgcccgcgaagatgccgtggaattcttcgctaaactcggttttgtgaatcagggtgaaatcacaaccccgcaaaccaccccgattcgtcattttttgatgatcaaacccatcgccacgctggacgatattctgcatcgcgccgactggtgcggacagctgcagcaggcctggtatcagcacattccgctcagcgaaaaaatgggcgtacgcattcagcagtacaccggacaaaaatttattaccaccatgccggaaaccggcaaccagaatccgcaccacaccctgtttgccggaagtcttttctcactggccacgctcaccggctgggggcttatctggctgatgctgcgcgagcgccatctgggcgggaccatcattctggccgatgcccacattcgctatagcgcgccgataagcggcaagccgaccgccgtggccgatctgggatcactgggtggcgatcttgaccgtctggcacgcggtcgcaaggcgcgcgtacaaatgcaggtcgaactgtttggcgataaaacgccgggcgcggtgtttgaaggcacctacattgttcttccggcgaagccttttggcgcgtatgaagagggcgggaacgaggaggagtaatctcctgtttacgctccccgggcgtgctgaatccgcccggcgatatcccgcataacatctcgcgctgattggctaattccaccaagctggaagaagccatgtatcactcccagccatcgctgagcggtacacgtcactccttgctccgtgaggcgttgaaacagcgcctcaccttcatcgcataacggatcgtactcagcggtaacgatatggacagctggcaggccgctgaagtcttctcgccacagcgggctaacctcaggatgcttacggtcggctccagccagatatatttcatagccgctcagcagggtatcgcgagtaattacgtaatccatgccgttgagggtatagctttcaaaactggccgtggcgtcgagcatggggtagataagaataagctgtacaggctgccagagccctttagccttaagccgcagcgccgttaccagcgccagatgtccccccgcgctgtctccgcaaaaggtgatccggtttttatccacgcccagtttgtccgcatattgccagaccagatctgcacctctttccgcatcgtcatgtgcggcggggaaggtatgctccggcgccagcctgtattgaatcgcaaccacccggcaattgccgtagcaggctaactgacggagctggttgtcatgggtatcaaagccgccgctgataaagcatccgccgtggtagtagatggcagcaggcaatagttcaggcgcattgagaggtgaaaatacccgaatggtaagaccctcaagaacaagcgtctccacctgaacgcgcgtttcggtctccccggcaagccctgtgctggcaatatagcctgctcatcgcacctcaatgctctggcgacgtgacgagggccgccctgcagcgataaatccctgaaccagctgtgcaataccctgttccagcgccatgaataatcccttttactgtatggatgaacagttttatagcctggtttgattcaaaagaaaacaagaatagtattgagggtaataacctggaaagcggctcgcaaaggcggtaacgcgtctctcaacgagaatggagagtatctggcatgaaaggcggcgggtattgctgtcgaattacaggccgggcaagcacgcgccgcccggcactgtcacagggaattactccccttcacccgggaacaggaacgggttgatcgagctgcgggcaaagccctcctgctccatcttcgcgtccagaatcagcgaggcgagatcgtcggccaccgcttcgactttcgggtccttttcctgatacagaatcttcaggtaggtgccgcagtcgccgcagctttcggctttcaccgccgcgtcttcgttttccagcgaccagtagttcagatcgcgggtctgctcgcagttgctgcacttgatgcgcaccacgtgccactcggtttcacacaggttgcagtgcaggtagcgcagcccctgagtggtgccgatttgcaccatgctggagaccggcattgagccacacaccgggcagaactgacgcgcctcgccgtattcggcgcgagctttgcccgggatcaggcttgccatttgtgcccagtagagcgacagggctgcccagataaacggcgccttatcgctgctgaccagcgagaagtcggacgcgaacagcgcgctcgccatctcttcaagctcttgttcggacgctttttccagattctcaatgaccgccagcgcggttccgctcatttccggcttcagctcggcaatcagcgaatgcagcagcttttgccagtgcttgtcgcgcggcaggacgtgaatgtccagcggcggcttgccctgcgcgttggcttctttgatgcgcgcggtcaggtccatttgcagcgggtggtcgtacagcaccacttcctgagcgtgggcgaccagcgcggcaaagcgcagaaaatcacccagcgggttgttctctgccagctcgcgcagacgctctgcgcggcggttgtagaggttcttgagtctggggaataacaacggcggaatataatccgccgtgcgtttctcgctcgaccccagctcatcttgcgggattatgcgaatactcattcagatgacttttcctgtttctggcggacttcacggtaccagcgcgggtgatgtttcttcgcccacgtgctggtgacccatccctccaccatcgcggtaatggtgcctttcacccagagggcggcgtagatatgcaccatgataaccacaattaacgccactgcggcaaatgaatgcagcatcagcgcgaatcggatcaccgggattgagaaagcaggcgcaaagtacggacgccagatgatcacgccgctcaccagcaacaggaccaggaagataatcgccgcccagaatacgcatttctggccgaagttataacgcccggtgtcacccacctcctcgttgacgacgatcttacgaatattcttcgcccaaaagatatcatcccgattgattaggttatggtgccagtagcggaaaaacatgatgatgaacgacgcgaacatgatgacgcccacaaacgggtgcaggatgcgcgccagctgtggtgtccccatgatctgcatcagccagttaaaggacgggaagaagaaccccagcccgcttatcgccgccagcatgaagcagaaggcggtgacccagtggttgatgcgttccggcgcggtgtagcgcacgatggtgtcacgttttctcatttgcgcacctcgtctttctcttcatgcagattgtcgtcttcctcttccgcgcggttcggaccgacgccgacgtagtggaagatgctcgctgcaaaggtggcagcaaagcccaccgctgccagcggtttccagatgcctttccagaacttcacggtagcgctgatttccgggttctccggcaggccgtgatacaggttcggcttgtcggcgtggtgcagcacgtacatcacgtgcgtaccgcccaccccggccggatcgtacaggcccgcgttgtcataaccacgggttttcagctcgcccacgcgctctgccgccagcgttttcatatcctctttagaaccaaagtggatggcgccggttgggcaggtcttcacgcacgctggctcctggccgacggttacgcggtctacgcacagcgtacatttgtagacgcggttgtcttccgggttcaggcgcggtacgtcgaacggacagcccgcgatgcagtagccgcagccaatgcactgctcggactggaagtcgacgatgccgttggcatactgaatgatagccccttctgacggacatgccttcaggcagcccggatccgcgcagtgcatacagccgtctttgcggataagccattccagcttgtcgttctgctccacttccgagaaacgcatcaccgtccaggacttggcggtcaggtccgccgggttgtcgtacaccccgacgttgtgacccacttcgtcacgcagatcgttccactcagagcaggccacctgacaggctttacagccgatacaggtggtcacgtcgataagcttcgccacttcctgctggtggtcccgcgcctgaggcgcgggcgtgaaaccgttagtcgcggaacgacggatgatgtcttgagattgataagccataagtcgtctccgttacaccttttccacgttcacgaggaaggccttaaactccggcgtctgcgtgttcgcatcaccgacgaatggcgtcagggtgttcgcaatgaaccctttcttcgccacgccctcatagccccagtgaattgggatgccgatggtatccacctgctgaccgtgaacgttcagcgtgcgaatacgcttggtcaccaccgccttggctttgatatagccacggttagaggagaccttcacggtatcgccatgggcaatgccgagcttgttcgccagcttctcgccgatctccacaaactgttccggctgcgcgatggcgttaagcagcgcgtgtttggtccagtagtggaagtgctcggtcagacggtaagtggtgcccacgtacgggaacttgtcctttttacccagcgcttcaaaatcgctcttgaagatacgggctgccgggttagagaccacgttcgggtgcagcgggttggtgcccagcggcgtctcaaacggctcatagtgttccgggaacggaccttccgccatcttatcgatagcgaacagacgccccatcccttcaggctgcatgataaacggtccgacgtcgctgcctggtgcggcagtgctgtagtccggaatatccacgccgccccatttcgcaccgtcccacttcagcagctgacgcttcggatcccacgggttgccctgcgggtcagcggacgcgcggttatagaggatacggcggttgagcggccacgcccatgcccagcccagcgtattgcccagacccgacgggtcggcgttatcgcggttggccatctggttgcctttcggcgtccagctaccggcaaagatccagcagccgctggaggtggtgccgtcgtcacgcaggtgcgcgaaggtactgagctgatcgcctttcttcgccagcacggtgccggtggccgggtcgataacgtccgccagcgccttaccgttgctctccatcgccacttcttccggcgctgggttttccggcgtcgagtagttccaggtcatgttcagcacaggctcagggttcgcgccgccttcagccgcatacatcttacgcaggcgtaagaagataccggccaggatctcgccgtcgttcatggcgatgcccggggcgtccgcgcctttccagtgccactgcagccagcgcccggagttgacgatagagccgttttcttccgcaaagcaggtcgatggcagacggaacacttcggtctgaatcttcgacggatcgacgtcgttcgattcaccgtggttctgccagaaggtcgaggtttcggtattgagcgggtcaatcgtcaccaggaacttcagtttcgacagcgactcaacaaccttgttcttgttcgggaacgaggccaccgggttaaagccctggcacagatagccgttcactttgccctggtgcatcatctcgaaatactgcagaacgtcgtaacctttatcccacttcggcagccagtcaaagccccagctgttttccgccgttgctttgtcaccgaagaacgctttcatcatcgagacgaagaacttcggatagttgccccagtagttcacctggccttcaagcagcggtttaggcgtgctggccgtcaggtaggtctgcaggtcggtctgtttctcgcttggcaggttcatgtagcccggcaggctttgggacagcaggccgaggtcggtcagaccctgaatgttggagtgaccgcgcagggcgttcacgccgccgcctgccatccccatgttgccgagcagcagctgcaccatcgccatggtgcggatgttctgcgcgccgatggagtgttgcgtccagccgagggcgtacaggaacgacgcggttttgtctttcgcgctggtttcggcgatcagctcgcacaccttcaggaagtccgccttcggcgtaccgcagatgttttcgacaacctccggcgtgtagcgggagacgtgctctttcagcaggttccacacgcagcgcgggtgttgcagggtggtgtcacgcttcgcaaaacctttctcatccagctcgtagttccagctggttttgtcgtacttgcgtttttcggcgtcgtaaccgctaaacagaccatcttcgaagtggtaatcctcacgcacgatcaggctggcattggtataggcttcggtgtattcgcggttgtatttttcgttggtcatcaggtacagcagtacgcctgacaggaaagtgatgtcagtacctgaacgaataggggtgtagaaatccgccactgacgcagtacgcgtgaagcggggatcgatcacaatcagtttcgcaccgttgtggattttggcttccatcgcccagcggaacccgacagggtgcgcttcagcggcgttaccgcccatcaccacaatgaggttggcgttcttgatgtcgacccagtggttggtcatcgcaccgcgaccaaatgttggagcaagacttgctaccgttggtccgtgtcagacacgcgcctggttgtcgaccgcgagcataccgagtgcgcgcgtaaatttctgggttaaataaccggtttcgttgctggaggcagaggcacacagcatcccggtggagagccagcggttgaccgtgacgccgtcggcgttcttctcaacaaagttggcatcgcggtcttctttaatcagtttagcgatgcggtcaaacgcctcttcccagctgatttgctgccatttgtcggaacccggcgcgcggtattcagggaatttcaggcggctttcggagtggataaagtccaccagaccggcccctttcgggcacaatgcgccgcggttaaccgggtgatccgggtcgccttcgatatggaaaatagacgctttggcgtttttagcaccgtcgccgaggctatacatcaacagcccgcaaccgacagagcagtacgtacaggtattacgggtttcacgggtgcgcagcagtttatactgccgcgtttccgccagcgctacgccgggcgcaaagcccagtgccgctgccgtggtgcctgccataccgccagcgcagatcttaaagaactgccttctgctgacctgcatgggtcactccttgtttcgacattgcttacatatgtagttttgacttcacggttgaagaatgaccgcaaaggaaaaaatttgcgttaatccctcaattccacgagggatatcatcagaataccacattgtcggtacagctgttctaatggcgttaatacaaagtgaacgtattatcaccatgttgattataaagtgtgatattgatcacgttaacagctctgcatgttaaagcggtgtagccggtggcaggttgcacccctgctaaatgagtaggagaatggttgtcgaaaagttgatccatactatgcgtacagcctgtggtttatgctgcaatagcacgctcgcttccgtggttgttcaggaataccgctgtgtctaaacaaaaccgtgatccccactcgtcacccctgcctgccggcattgtggaactgtcggtacaacgaccgccccacataaccgatgccatacccgattttctggccgaagaagtgcccgttgcgctcgtttacaacggcatctcgcatgtggtgatgatggcgtctccgaaagatcttgagctgttcgccatcggtttttccctctcggaaggcatcattgagcatccgcaagatatctatggcatggacgtggtgcaggcctgcaacggcctggaagtgcaaatcgagctctccagccgccgctttatggggctgaaagagcgtcgtcgcgcgctggccgggcgtaccggctgcggcgtgtgcggcgttgagcagctcaacgatattggcaaacctgtttcaccactgccgtttactcagacctttaatctggcgcacctcgatcctgcgcttgagcacctcaacgatgtacagcctatcggccagctcagcggctgcacgcacgcggcggcgtgggtattgccgtcgggagagattgccggtgggcatgaagacgtgggccgccacgtggcgctggataagctgctcggtcgtcgtgcacgtgaaagtgaggtttggcagcagggcgccgcgctcgtttccagccgcgccagctatgagatggtgcaaaaatcggcgatgtgcggggtggagatcctgtttgccgtgtcggcggcaacgacgctggcggtggaggtggccgagcgctgcaacctgacgctggtggggttctgcaagccgggaagggcaaccatttatacccatccacagcgattaatagttaatcagtaattttgaatgataatagcaaatccttccgcttttagttgttcgcgatgaggtctagtatttatctcatcaaggcacggtgccttacctgaacaacttaatgaaagggtttatattatgaaaagcatcaaaacttttgtcgctgtaatcgctctggctgcttctttcggttctttcgctgcgcagactgtgaccgcaaccgcctctaccattgatggtgcagaagcgaaaatcgcggctcaggctcaggaagcgggtgcgtcatcatacaaaattacccaggcattctccggtaaccgcgtacacatgactgctgaactgaacaaataagcgagtcacaccgtcgaaagagcgcccccggggcgcttttttagtttatgcccgccacgcgcagcaatgctgtcaccactgccgcggccacaatgaccacgattaacggcattttccgccaggccaaaaacaccgcaaacgccacgcccagcacgcgcgccatgcccgcgaagtggtctccctcataaaaggtggtcgccagcgccacggagaacagcaataccgttgccgcatctgacagcagcgcctgagaacgctccgacagcgccagccggttgccgagtttggcgccgccaaggcgcattaaataggttccggcagaaagaatggcgatgccgagaataaagatcgtcatgttttccattattttttcctcgcggcaagaccgagtaaagagagcagtaccggtaatcccaccggggcaaacggcacggcggccagcgataacacggcgccgctgcaggcgcggatcagcgtggtacggtttttaaatgcgggaacaactaatgccagcagaatggccggaaataccgcgtccagcccgatggtttccgggtcgggcaacagtttgcccaccatggcacccagcagcgcacccagcggccagattatggcaacgcctaggccgcacagccagtaggcagctttacgctgttcggcggttttttgcgacaggccaaacaccacgctttcatcgttcatgatgtggcagcccagcaggctcagaccgcgcttgcccaccagctctcgcaccgttacgccaaacggcacgtggcgcgcgttgaccagcaaacctgccgccgcggccgccagcggattgccgccgctcgccacgatgccgataaacatgaactcagacgcgcccgccagcacggtaatggagagcacaaacggcacccagaccgggaaaccgtaggccatcgccagcgagccgtaggacatcccgaccacgcccaccgcgaggcagaccaggatgattgcttttatggtgtcgcctttcaggcaagagagatgatgcttcatacaattttagccatatcgaacgtgtatccattataatgaacgcaacgaaactgattttcaagacgaacgattcgttcgttttatagaacaagaggccgttatatgacgcagccgatcagcctgatcgccaaaagtctggtgcgagaacgcctgcgaaccgggctttcactggcggaaattgcccgccgtgccgggatcgcaaaatctacgctttcccagctggagtccggcaacggtaaccctagcctggaaacgctgtggtcgctgtgcgtggcgctggatattcctttcgcccgcttgcttgagccgcagctaccgaccacgcaggtgatacgccgtggtgaagggacgaaagtggtcgccggagaggctaattatgaagccattttgctggcggcatgccctcccggcgcgcgccgcgatgtctatcttctgatgacccaaccgggcgcagaccgtctttctcagccgcatccaccgggctcggttgaacatattattgtgacgcaggggcgggcgctggtcggcctgctcgacgcggcggaagagcttggcgcaggggattacatttgttatcccgccgaccagccgcacatcttcaaggccttggagccagacacttacgcgctgctggtggcggaacaaaactaacgaagatagggaaaatcatgtcgctcaaagccatcgctaaagaactggggctctctgttactaccgtcagccgcgcccttaacggatatgacgacgtttctgacgagacgcgcgcacgcgtggaagcagaggcccagcgccgtggttaccgaccgaacaccttcgcccgccgcctgaagatgggcaaaattgacgccgttgggctggtgttcccggtccatcctgttccgctcaataacagcgtatttatggacatggtcggcgaaattagtcacgaactggcgcgacatgaaatcgatttgttgctgattgccgatgacgatctggccgataaacacagctatatgcgcatggtgcaaagccgccgcgtggatgcgctgatcgtggcccacacgctggatcgcgatccccgtcttgagcagctgcaggcggccggttttcctttcctggcgctcgggcgcagccatctcccgcagccgtacgcgtggttcgacttcgacaactatgccggtacgtacaatgcgacccgctggctgatcgggaaaggccatcagcgcattgccctgctgggcgaaagcaacaatcaggcattcatcacccagcgtcgtcagggctatctggacgcgttgcgggaagccgggctttccagcgaatggctgcgcgccatgcccccttctcgccgggtggggtatgccaccacgaaagagcttctctcgctatcgcagccgcccacggccatcattaccgactgcaacacccacggcgacggcgcggcgatggcgctggcggagctgggccgcctgaccggcgagaacgccgttgcgctggtggtttatgacgggcttccgcaggacagcatcgtcgacgctgacgtggctgcagtgatccagtccacccgtcagggcgtcgggaaacagattgccgatatggttcgccagctgatcaacggcgaggcgattgagcagctccaggtactctggcagcccgaattctctcccggccagacggcctgaatctctccattttctaaacccgatcacaaatccgaaacgttttggtttgtatccgaaacgtttcggatcaaaactcaaggcatcccatgacaggagatgtctgatgcaagattccattttacgactcgaaagcgcgacggtggatgtggtgataaaaacgcacccgttcgccgaaattatctactgggggccgcatcttcagtacttttcgccgcagaatgctgaaaccctttcccggccagttgccaacggcaggctggatgtggattctccggtcacgctgatggccgagctggggcacggcctgtttgggtcgcccggtattgaagggcatcgtctgggcctggacggttcacctctctttagcaccacagacgtccatcagcaggggcaaaccctgacgattacgtcagaagatgaacatgcgggcctgcggctgaccagcgagctggcgctggatgacagcggcgtgctggcggtgcgtcacggtttaaccaacctgaaagcgcaggcgtggcaggtggaccgttttgccataacgctacccgtggccgaacgcgcgcgggaggtgatggccttccacgggcgctggatccgggaatttcagccgcaccgcgtgacgcttgagcacgacagctttgtgattgaaaaccgccggggtaaaacctcccacgagcacttcccggcgctgattgccggtacgccgtcgttcagcgaaatgcacggcgacgtctggggcgtgcatctgggctggagcggcaaccaccgcctgcgtgcggaagccaaaaccgacggccgccgctatctgcaggctgaagccctctacctgccgggcgaaatggcgattgaggagggcgatacgctctggacgccgcgcctgtatgccagctactccacgcagggtctgaacggcatgagccagccgttccatcgctacctgcgcaacaacgtcatccgcttcccggaaaacaaaccgcgcccggtacacctcaatacctgggaagggatctacttcaaccacgatccggagtacatcatgcgcatggccgacgaggctgccgccctgggcgtggagcgcttcatcattgatgatggctggttcaaaggccgtaatgacgaccatgcggcgctgggcgactggtatctggatgagaagaagtacccgaacggcctcacgccggtcatcagccatgtgaaacagctcggcatggcgtttggcatctgggttgagccggagatgattaacccggattccgatctttatcgtgcgcatcccgactgggtgctggcgttgcccggctacaggcaacataccgggcggcaccagctggtgcttaacctgaacattccgcaggcgtttgattacctggtggagcgcatgagctggcttctgggtgaacatgaggtcgactacgtgaagtgggacatgaaccgtgagctggtgcagccgggtcacgacgggaaggccgccgccgacgcgcaaacccgccagttttatcgcctgctggacgtgctgggcaagcgtttcccgcacgtcgaatttgaatcctgctcctccggcggggggcgaattgattatgaagtgctgacgcgctgccaccgcttctgggcctcggacaacaacgatgcgctggagcgcaacgctatccagcgcggcatgagctatttcttcccgccggaggtgatgggggcgcatatcggtcatcataaatgtcacgccaccttccgccagcacagcattgaattccgtggtctgacggccctgtttggccatatggggctggaactggatcccctcaccgtcgatgagcaggagcgcgaaggttatcgccgttacgccgcgctgtataagcagtggcgcgaggttatccatcagggcacccactggcgcgtggatatgccggatgccactacgctggcacagggtattgtgagcgaagataaaacgcagggactgtttatcgtcagccagctcgccatgccggactacacgttgatgatgccgctgcgcatgccggggcttgaggccagcgcgcagtatcgtatttcgctgctcgataaccctgagattcgcatcaccggtgagggaggccataccatgcgcaagctgccggcgtggatggaaacgccgcaaacggcgagcggtgagtggctgatgcaggcgggcattgcgctgccgattctcgatccggaaagcgccatcctgattggcgtggaacgcgtgtaaaggtgacgggccgggaaactggccctccgttgaggataaaaataatgaacacaacaacctgtacccacaaagacaaccccaatttctggattttcgggctgttcttctttctctactttttcatcatggccacctgctttccgttcctgccgatctggctgtcggatatcatcggcctcaataaaacccataccggcatcgtcttctcctgcatctcactctcggccattgccttccagccggtgcttggggtgatctcggataaactggggctgaaaaaacacctgctgtggatcatctccgtgctgctgttcctgtttgcccctttcttcctctacgtctttgcgccattactgaaagccaacatctggctgggcgcgctgagcggcggcatttatatcggctttgtcttttcggcgggctcaggagccattgaggcctacattgaacgcgtgagccgtaacagtttctttgagtacggcaaggcgcgcatgtttggctgcctcggctgggggctgtgcgcctccacgggcgggatcctgttcggcatcgatccgtcgtatgttttctggatgggttcggcggcggcgctgctgttgatgctgttgctggtggtcgcaaagccaagacccaatcagacggcgcaggtgatgaatgcgctgggtgccaaccagccgcagatcaccgcgaaaacggtctttagcctgttccgtcagcgcagaatgtggatgtttattctgtacgtgattggcgtggcctgcgtctacgacgtcttcgaccagcagtttgctaccttcttcaaaacgttcttcgccacgccgcaggagggcactcgcgcctttggttttgcgaccactgccggggaaatctgcaatgcgatcatcatgttttgttcaccgtggatcattaaccgcatcggcgcgaaaaacacgctgctgatcgccggggtgattatggcgacgcgcattatcggctcgtcgtttgccaccaccgccgtagaagtgattgccctgaagatgctgcacgcgctggaggtgccgttcctgctggtaggggccttcaagtacatcaccggggtgtttgatacgcgtctttcggcgactatctatctgattggcttccagtttgccaaacagtcggcggcaatcttcctctccgcgtttgccgggaatatgtatgaccggatcggtttccaggagacatacctgatgctgggctgtttcgtgctggcgattacggtggtgtcggcgtttacgctcagcagcagggaggagattgcggcaggcaataaggcactagaagtccattaacgccctgaacccactcactattccggcgttggtcaaaaaatgaataaccttataaaaactacggcattgataatcattttcaatatcatttaattaactataatgaaccaactgcttacgcggcattaacagctgtgccgcccgacaataatggagaggattatgagttatacactgccatccctgccgtatgcctacgacgcactggaaccgcatttcgacaagcagacgatggaaatccatcacactaaacaccaccagacctacgtgaacaacgcgaacgccgcgctggaaagcctgcctgagttcgctaacctgcctgttgaagagctgatcaccaagctggaccagctgccagcggacaagaaaaccgtgctgcgcaacaacgcgggcggtcacgctaaccacagcctgttctggaaaggcctgaaaaccggtactaccctgcagggcgacctgaaagcggctatcgagcgcgacttcggttccgttgacaacttcaaagcggaattcgagaaagccgctgcaacccgcttcggctctggctgggcgtggctggtactgaaaggtgacaaactggccgtggtttctaccgcgaaccaggactccccgctgatgggggaagcgatctctggcgcatccggcttcccaatcctgggtctggacgtgtgggaacacgcttactacctgaaattccagaaccgtcgcccggactacattaaagcgttctgggacgtggtgaactgggacgaagcagcagcgcgtttcgccgctaaaaaataaggttgcattgacgcctgtgagaagcgagtctgatggctcgctttttttgtatctgcgtaatggaggcagcgatgcattatccggtgaatgtatttacaggcaaggtaagggagtacgacggcagccgcccgagcgccatcgccaaaattcaggtcgacggtgagctgacgttaaccgacctcgggcttgcgggtgacgagcaggccgaaaagaagatccacggcgggccggagcgcgcgctgtgccactatccgcgcgagcactatcagcactggaaggcggagttccccgagcaggcggatctcttcgttgctcccgcgtttggtgaaaatctctccactgaagggctcaccgaaaagaacgtgtttattggtgatatctaccgctggggcgatgccctgattcaggtgacgcagccgcgctcgccgtgcttcaagctcaactaccatttcggcattcatgacatgtcggctcagatgcaaagcgcgggtaaaaccggctggctgtaccgggtggtgctggctgggcaggtttcagcggatgcgccgcttgagctggtatcacgcctgagtgaggtgtctgtttacgacgcctgcgccattgcgtggcatatgccgtttgatgacgagcagtatcatcgcctgctgtcggcggcggggctgtcgaccagctggacaagaacgatgcagaaacggcgtttaagcagcaagatcgaggataattcccggagattgtggggtaaatagacctccgtaaaaagtaggccgggtaaggcgaagccgccacccggcactaacagctacgaacgcttatacaacggtagccacagcgttaaccgcagcccacccagcgggctgtcgtcggctttcacccagccgcggtgctgctgcatggcggtttccacaatcgccagccccagtcccgtaccgcccgattcccggtcgcgcgcctcgtcggtgcggtagaacggacggaagatctgctcgcggtcttccgggctgacgccaggaccgtcgtcgtcgacaatgacggtgatcccgtctttatccaccgagaacgccacctcaatcttcgtgtgcgagtagcgcagggcgttacgcacgatattttccagcgcgctttccagcgcgttggggttaccgtacagcggccatggccccggcgggaagttaacggtgaaggatttgcccatctgctccgcttcgaacgccgcgttatccagcacttcatgccacagatgattggctttcaccgtttcgctcaccagcgcgtttttctgctgattgcgcgacatgaccagcaggtcgttgatcatgctgtccagacgatgcgcttcggtttcgatgcgctccagctctttgctttctccgctgcggcggcgcagcagggcggtgcccagctgtaagcgcgtgagcggggtacgcagttcgtgcgagatatccgacagcaggcgctgctgggccgtcatcatgcgatcgagcgcgctcaccatctggttaaaactggtcccggcggccaggaactcctgcggtccggactccagttccgggtgctgcctcaggttgccctgcgccacttcgtcggcggcgtttttcagcttacgtgcgggttttgccaggctccacgccagccataacagcagcggcgagctgaccagcatcgtgacaatcagcagcaggagagggcggtcaaacagcaggttgataaaatcggactgggagctgctcgcggggcgaatcaggtagagctgatagttatcctcgccatctctgacggagaacggccccaccatctctacgcggccatattttttcttctgggggtgatcggcattatctgcctggccaatgaagttgcggatgatctgcatttcattgcgatcggcgccaatcacgcggccttcgctggtcaccagcagcaggcgttgtccgggcggcgcccacttgtcgatagcgcgaaatagcctgcgccaccacatcaaatcgtttggcggatcgtttgccagctcggcttccacgtgctgctcgatcatcacgccctgacgttgctcgctgtcgagcagctccgtcatctggcgtgagtcgagttttggcaacatcagtacgagcattaaaaccagtgccagcgtcaaccagaagatggcgaagatgcgggcggttaagcttcctatcatgaagcggaaaccatcagataaccgcgaccacgcagggttttaaaccatgggtgaccgtctttacgctccggcagcttacggcgcaggttagagatgtgcatgtcgatggcgcggtcaaacggggtcagacgtttgcccagcacttcctgacttaaatgttcacgcgaaaccacctggccgaggtgctgtgccagcagatacagcagggtgaactcggtgccggtgagttcgagtgtctggccatcaaagctcgcttcctggcggcccggattcaggctcagggagtcgacttcaagggtcggtgaactgttgtctgtattctgctgctgctcgctccagtgggaacgacgcaggatcgcgcgaatacgggcgaccagttcgcggtcgttaaacggcttcggtaaatagtcatccgcgcccagctcaaggccgagtacgcggtcgagttcgctgccgcgcgcggtcagcatgataacgggagtctggtgtgtctggcgaagctctttcagcgtatcaatgccgtttttcttcggcatcatcacgtcgagcaaaagtaaatcgatgctgtcgtcaaggagactcagcgcctgctcgccatcatgggcaaccaggacgttgaaaccttccatgtcgagcaactcctttaaaagggatgtgagctctcggtcatcatcaactaacaggattttattcattgtttaaatacctccgaggcagaaattacgacatcaaggctgtctaatccatgactttacgttgttttacaccccctgacgcatgtttgcagcctgaatcgtagactgtctctcgttgaatcgcgacacgaaagattttgggagcaagtgatgcgcaaagttaccgctgccgtcatggcctcaacgctggcgttcagtgcgtttagccaggctgctgtagctatcatcagcgataacggttcctcacaagagggcgcaacgcagcacagtagccaaagccatatgtttgacggcataagtttaaccgaacatcagcgtcaacagatgcgagatctgatgcagagggcgagacacgaccagccccctgttaatgttagcgaaatggagacaatgcatcgccttgtcaccgcagaaaattttgacgaaagtgctgtgcgcgctcaggccgaaaaaatggcacaggaacaggttgctcgtcaggtagagatggcgaaggtccgcaaccagatgttccacctgctaacgccggagcagcaagcggttttgaacaccaaacatcagcagcgtatggatcagctgcgtgagtttgcacggatgcagcgaagctcagaaacctcgtttttcagtagcaatagcagtacccgtagtaaccagtaaaccctgttttccttgccatagacaccatccctgtcttcccccacatgatgtgggggttttttttatcaatcacttacctctgtattcaaatcaaaacaacgacttaaaaagagttgtgaaggtttggaacgttttcaaatttcccagggtgtggacagtatgtggacactccggggcgcattttatgccgcaattcctccctgcaatggattcagtgtaaccgcgttttgcaggtagtcaggcgacaggtgcgcatagaccatcgtttgctgaatattcgcatgccccaggatctgttgcagggcgataatattcccgccgttcatcatgaaatggcttgcaaaagtgtgtcgcaggatgtgtgttgcctggttttccggaatgtccggcttaaccgcccgcagtattttgcagaacctttcataatccactttgaacagcttcccgctggcctcttttttcaccttgttttccagctcttcagagatcggcaccgttcgctttttcccgttcttggtcttcaggaacgtgacgcggcagttaacgatattcgaccgcttaagcgtagcgacctctgaccatcttccgccggtgctcaggcatagcagggcaactaacagataatccccctccagcacgctcagcaaactgttgatctcttcccgctccaggaatgtcatttccgggttttcttccgccagtggtggaagcccgttaacggggtgttgaccgctaaattcctcaatctgtattaacttcgtaaacatgccggataatcggtacatctcgcgattaatcgttgatgctttgatcccggcattcaaacggcttgagcggtaatccattaaatcccttttgcttaaccgactaacgacgggatcgccgaggccgcttattgtcttcaaaaggtgattgaattcctttttgccgttttcatggttttgcccgtggtaccgccaccaggcatcgagcaactcacttaaaggccgacggtcggcgcgcttaccagcccattctttttggctggcgttcgctatcgtgtattgctcaaacgctgtagcttctgcctttctgtcaaacgtcttgcggatgcggcgtcctgctgccccgcgcggtctaatgtccaccatgtagcgaccatcatcgagcttcttaatcgacataagaaagccctccggcgcagatttcaccatcttggtaacaaatagtgaaaatgtagtgcttataaagtgttaaccagtctgtttctcggattggtctgattctggcgactctggcccaatgtgcgcgagggccggtgcaatctgaccagcctgcggggaggttttgtcagtcatcagccatagcgtgtatttctgaaattgcgaggtattcgtgatcttcaaaaccactcctagccccggctctgcgtgtcccccctcataattttttaaagtacttagggctaacccgctgatttcgcagaatctaacttgcgttagtccttcagctttacgtatcgccttaattttttcggctatgttcatttgacatggttcctaccttgagactatattctcccaaaaggtctaaaggttagaacctttttgggcgtggtatccagccgctagaacgttttcaaacggtttagaaagggctggatcttacgagattaacacgagctaacaggggcgtgaatgatggagagcgctaaaggcggcggagacaaggggaagggtttccgccgtagatattccaaaaatgggatttacgcagggtcgattaaggctagtggcggctctttggtgttagtgattcagtcagttccgccttggcaatgtactgctggagaaacgccaccgtgtcttttgcttgctcaacagtaagcccagtaaaaacctcatcggcagcagggatctggtttggttgggctaaatggtagtgaaaccgcaaacaggcaaggttatttgcgatgtagtactcaagttcagcgggaatgaagattgggatttctttgttagacattttttatacctttctggttgtgtggaaactccagaataccatgcgccggggcatggttaaaaatcccggaaaattaaacttttgaggaggttttatggaagctcaagactacgcaatcaagtacccacttgatgctgtccacgtggagaagttcgccgagctgatcggcaaacctaagaccgcagtagaagaaatgatcaaagcccgaaagctgccagtgattgaactgcgcgacccaaccaaaccgaacgcacgcgccggtgagcgctgggtttacatccctgagttcaatcgtgctgtgcgtgaggcgtattacaaccgcccggtagaacagcgtgatgcctggttgttgtggatggggctttaatgcgaaccgcttcagggagggggaacatgaaaagtggatttggcggagcggtgacgcagctgaatagtaaaaccagcctttaccgtggctttaccattctgaaactcccacgcaaaaaaccatacagccgccagcgatatcagattacgcacggcggctgctatttcggtattgattttgcctttgcagaggcaatggtgaccattgatagattaaagcgtggtgaaaaatatgaagcttgaaatgattgttgggctcttaattttctcaatcgcagtaataagcctgattcagtttttaatcaggttgcactgcaagaaagttaggcagaaaagagaaaaagccttatcagaatttaaagcgcgccgggaagaagtagagcgcaaagcacgcgggcaactttaacaggtatacgatatgaacgaagagatcccatcacttgcaagcctcctgaaaaatggttgtcaggttacgcactaccgtaatacgcggggctggattgaatgcccggacgggcgtttctttaagccggagcctaataaggttcgttttgttaaggaaatgaacaaaccttttatttatacaaaaaagataaataaaggtgtgctggctactctggcaagagcatttaaaaaactcttgtaacaagaaaaggggcttacatgtttactgaagagaaaacatcgtgggaacgggaaatgctgatccgagaggcggtagaaaatgcggagcagggttttaccgtaattttgaaaaacggaaatcgcattatcgttgcgccagatagcccgtctattgatttgattatttacgggctggagaaaaccattcgaggtaatcacgagcgtgcgcgaatgacctttattgattttctttattactggcacgaaaggttgtttaaacaggttaaaagaaaacctcgccctaaccactaattaagcaggcttaaattaacggcatttattttgccggggattcgttttgcctttttcaggaggttgcatgtcggttaagtcaataaagctggatggcgaaataagtgatccggagtttgtagagataagcaccaacgcacgaaagcacgagcgcgcccacattttggggttgcttcgtatttttgtcagccagctgaaaaaggaaagcgccacaccagaagagatttattcatcagtcgagcggtggatcgcaagccgcgaattaaccattaacgaggataacaaataatgaataacttcatgttagatattcgcgcgctgggaaaagcgccagactcgccaatttttgctattgagtgtgttttcttcgagccctcgacaggtcagattggccctcaattctatcgcgccataaatatcaggacagtagggggcatttatcctgaagctgttttgcagctcatgaagggagacaacgcacagcgcgctgaggttattagtgcaacttgcagcgagattgacgccatacagtccgcctgtcggtttatcaataccaccgcatcaaaacacgaaaaactctattgctggtctgcgagcaattcagctgatgtggctacgctggctcatgctctctcccgctatggcatcccagatcagcttctgccgcctttcgaaattcgacatctctctacgttaatccacatcgccggtatcaccggatatacgccgcacccgcgccgctcgacggcaacctacatgctgaccgatgcggtatatcgggcggagcaggtttgcgaggtctggcagcgcctgaccagtcctcactttgagtccctgtgaggtctgccatgcatccgcgtctttcaatagcttgcagtgcgccattgcatgtattcctcagggccgccgcagccctgaaatgtttttcacgtggtcagcgcaacttcacccgcatcaaaccgcacgcctatctcgtgatccgcattggccgtcgctggcgcttgcttagcaagaacggcggcgctcagtggcgactcatgacccatgaaacctacaaccaggaatttcgcaaatgatcagatcgccaattaaatgggcgggaggaaaaacccgcgttatgccgcagctgctcaagcatttgccgaaagcggattgtctgattgagccgtttgtgggtagcggaacagtgtttatgaacacggattaccgccgctatgttctctgtgacagcaatatcgcgctgattaattttttccgacaattaaccggccgcaaagaagacgctattgccgcctgccgatgggctttcaaaggcggaaacagtgcggaggaatactacagacggcgcacagagttcaattcactggcccgccaggctgactctaatccggacgctgcaatgctttatgccgcgtatttcctgtacctgaatcgccatggctataacggtctgtatcgcgttaaccagaagggcgaattcaacgttccattcggtaagtatgccgagccttactttccagaagcggaaatgcgcttattcgccgaaaaggccagcgacacgaaagcagtctttgtccatagtgatttccgccaatctatccctgacgttatgcaactcgcgcatgacgcggtgatttattgtgacccgccctacatccctgcgagcgacaccgccaatttcaccgcctacggcaaaccatttaccctggatgatcatcgcgcactggtagcggctcttgtggctgttaaccgtcagtacgccaccctctcgatcatctcaaacagcgacacgcctgaaactcgcgaaatttattccgccttcaatcttcactccctgagtgtccgccgctctgtgagcgccaaaagccgcgatatggctggcgaggttattggcgttcttcgcgtgtgtgatggctgcgatcgtgctggcggtggttgctgtccggattgtgggccggtaatggggaatgcgacttacggcgagatgtttttaggcttcgaccctgccaagggctgtgaaacgcaggagcctttctgatgaccatcaaaaagactcatacgggcatcgttatcaccaaagacggcccacagcgcaagaagctgcatcagacggaatccatgtgggtagtcggtaaaacagagtgctaccggaaagacaccggcaaacgccactttgccgaacatacccgccgtcgattgctgcttgattcaatcgaagagattcgggagggcgccacccgatgaacacagttgatgcagtgatcactcgcgtgctcgacgttcgcccataccgccatttctggatcgttgaggtggaggtgttgagctggggcaggtacagcagcacgaccattatccgtgataccgaaaaagacgcccggcaggttaagcccggcgacaccgtgacggtgtaggtggtgcgcgatgacggcttattacaacgaaatcgaccctcatgcagcgcagcatctgcgcaacttaatcgacgccggccatatagctccaggtgttgttgatacacgttcaattgaggatgtaaccccaaatgatctcaaaggtttcagacaatgccatttcttcgccggaattggcggatggtcactcgcattgcgtcgcgcaggctggccagatgatcgtccagcatggacagcgtcatgcccttgccaacctttcagcgcggcaggcaaaggacttgggtttgctgacgagcggcacttatggccctccacacattggcttatcggccagtgtcgccctgtcgtggtatttggcgaacagtcttcaagtaaagatgctgaagactggatcgaccttgtacaaactgacatggaaagtttgggctatgccttcggggcgtcggcgtttccgtctgcgggcgtcggtgcgccgcacatccgggagcgcacttactggctggccgacaccaacagcaagcaatacgaagaacgcttatcaggatgccgagaaggtgatcgccaggaagctggctgggcgccaatcgaacttacaggactttgcttgtcttgcgggctggcccacccctgcggcgagggatggaaagggcggttatcgggggggcagagtgaggaatgggaagctgtcaacggacacgctggatgtggtagcacagatagcaggcccggcgcggttaacggcttctggggagcttctgactggctcttttgcagagatggaaagtggaggccagttaaacccggccttaagcctttggttaatggggttcccgccagagtgggaagattgcgcacctacggaaacgccatcaacatcgaagcggcggcggcattcataagtgcttatatggcgacggtgagttatgtctgatctcgccgcgttagcatgggaatggaataccaaacggcaggccatcaaccctcataaaaccgaaagctcagccattgagtatctgacaccgaacggcgagcgcagggcgctcgcttatggcgatctggttgatacggtctaccgcgcaccattgcgcccgcgcgagggtggtgcgcgtgaggcatttgatcgcaatggccgcgctaactacctccgccgccgggtgcaaacgctcccggcgtttatccgtaagcgcttctcgcagcaccttgaaaacctcgaacgaagcaagccaaaagacgtcgtgcgctggctgttcggtacgtttgagcggcacgttttacgccgtgttgatgcggttaacgcgcaatatctcccacaaagtacgctcccggcgcttcttcttccgttgcgtgatgaatttcacctgttgccgtgggcggacaaaaagcgcctgaaaagactggcgtataagcttgcgaatctgatgaaaagcgagtttatgcgcgagtttgattttcagtatgaacaaacatccgatctcgagttttcgtcgatttacgcatacggggctgtagcgagcaaagcggcgacgctcaatatcgcgatcccagggtgggtgcgctattgcgatgaagagttggacgccgacgaggcactgcgtgccgctggcagacttcattccgaaaaatggtggcttaacaaaatccgccgcatccatgactgctggcgcgagcatcttatgatcgcgaccggctatgtcagcaaagtggcttcaccatattgctctgatccctgcttcagggaatgggttgcgcagaaaaaagcgaacttcgaattccttcaggcgatggagctggaagaccaggacaccggcgagcgcagctcattactggataaggtgatgggtagtgtttccaacccgaagatcgcgcgacatgagctgatggtgcgcatgcgcgggtttgaggatatggcgaatgaaatggggctggttggcatgttctacacgctgacagcgccgtcgcgttaccactcaacacatgtccagtctggcagacgaaacgataagtaccagcacgtcagcccgcgccagacgcaaaaatacctttgcaaagtctgggcgcgcgtcagagccaaatggagtcgcgaaggtattcgtacatttggttttcgtgttgcagagcctcaccacgatggaacccctcactggcacctgttgctcttcctccgtcctgaggaagtggagtatgcaacagccattttccgtaagcatgccatgagagaagacgggcaggagccgggggcacaggagcaccgctttaccgttaagccaatcgacgagcaatttggctcggcgacgggctacatcgccaaatacatttccaaaaatatcgacggctacggcatggatggtgagcttgatcttgagtcaggccagccagtcagggatatggcaaagcgcgtgcgtgcctgggcttcacgctggaatatccgccagtttcagcagattggcggcgcaccggtgaccacctggcgggagctgcgccggttaggtgaccgcgagctggtattgcatccggagctggaagcggcacgcgccgcagccgatgcgccagactggccgggatataccaacgctcagggcgggccatttgtcgcgcgcgattgcctacgcgttcggcttaactatgaattcaccgaaaacggcaatgattatggtgacacggtcgccaaaattactggcgtttattgcccttatacgggcagcgaatcagtcattttcacccgcaccaccgattacaagattgtgccgaagcgtaagccgtcgccggtcgagattttgaccttagaaggccgcgcagcggcccctcggagttctgtcaataactgtacggggcgctccggaacggacgaaaaaccaccgttaaaagtggcggtgccagatggtaccgcaccgtcaaaaccggcgatgcatgccggtattgatcacccggacagtcagatgacagaacttccgctgaatatcgaagatttgcgccgatattcacgccagcagcggcaggaaatcaccagcagactgaaaaactttggccgcgaaagctcagatcatgccttcgagcgtaccgcgcgcggcctgcgcacgtctgttgatgatgaaactgcgttggcgtgggggccaaaagtggtcgctgcgaaagatatgagcctgacaccagaagaggcagaacagcgctggcggcaacagctgcggactgaagcggagcggcgtgcggataactatgccgcagctgttgcggaatatcagaggaaaaaagccgaagcggcattgcggcaggtacagaaaagagaggctgcgaaacaaggcggagtcagccaggaaaccatcgccagcatcggcgcgcagctgcgtagttgcaggattttcgtcagcgatgacgttgttaggtcgattgctggcggtgcccgcgttcgccacggcggcggactgatcgccatgagcaatggccggttgcaggaagtgaaggcatggcgtgccggtgagaaagataaaccgacgtctgaatacatggcggtgtgtgacctggtcacgcgctggaagaaggcggctaaacgaaaaagacaggagtgaagcagtgagtgagatggtcagccatggtcgcttttgacggttctggccattctatcgagcaacgtcattttgggcggtgctgcaggttggtttttttggagcgagagcgaggaagttatgagctatctgggaagcaaagcggcgagcggtgtttatcaaaaaattattgccgagatgccaccgcatgacacgtatatcgaaactcacttgggcggtggcgctgtcatgctgcgtaagccaccggcgaaagtcagttgggggattgatattgatccgctgaccattgaggcatttaaccagagtaatcatgagtttctggatgctctgggcgatagtctgtttattgacgtcggcgacgcggtgacgtttttggatcgctttgattattcctctgctggccgggtgctgatctacgctgatccgccttatctgcatgaaacgcgaagcagctctgcgcgctatcggtgcgagtattctgttaaagaccatgaacgattgctggcatgcttacgtgacctcccggataacgtaagcgtaattttatcgggctacccatcagacttttatgaccgcatgctgcatgactggcgctcccgagagtttcaggcaatgacgcgcggcggggtgaggacggagaaaatctggatgaactatcaggaggggcgcgcttattcgcatacttttgcaggtaaaaattacaatgatcgctatcgaatcaagcgaaaagcgcagcgctggaaggaaaaatttgcagcgttaccgcctgcggagcgcctggcgatcatggtggcgctcggcgaagttgatcaggtgtaaaaatagggccgcgcggatgcaaaaagatgcacaaatttgcacaatttttgaaacaacgttttttccatgccgcccaagcgctggcggggcctggacggcctgcacaaagtgcacaaaaagaggtcggtttagcgcgcaggcgaggcgggggagcaagcgcgcgcaaagggggtcaggcagggggtcatatcctccgccattcgccgcctgtcgggcgctcatgttgatggttgagcgaagcggcagcgcgagagaagtcgcgccagaagcccgctggttgcgtctggtagggggtgtggtttatttgtgtttcgcgagtggccgatatggccggaaatgatggtgctgcgggtggtaccgcaccgccagaaatgacgatgcggccaggagatcacttcgtgggttcaagcaatgcgtaagggttgaagcgaatcacctcctcaccaagccagtcgttaacatgcttcatggcctccatgcagggtgtcagttcgttgacggcgaacacgcgagccgctttttcaatatcaccgaatgaaccgttcccttccggaatggcgcccatcagttgcggcggcacccggtgcgctgccagcatgtcatcgcgggtggaagacttcacccccacaaactcatccttagccgatatctggctgaatggcagtatttgcactgagtctttgccgccgttaggtgcgtgcagaagaatgttcttaaacgccccgccgcgccgggtatccgtcagcgtctttttgagcttatcaaggctctcctggtcggccatcgcgctgttaacgtagacgatgcagccagcgtgcgagccgttgtcgtagtagagctttctgaacttgtcagcagaatgggccaggtttgcagacagcaggccagcgaaatactcaggcatgccgtatatttcctggtgaatatccgggctgagaacgtggcataccgagcccgttgaaaacatgtgatcctgtagcccggcctgaataaaccagtaagtgtccaggtcagaaccacggcgtgtgtatttcgccagcgagtgacgaaagccaaaggaaccaccaagccggttttttcgcatctcaagatagccattcccgaagacaaaccagtccagtgcgaaggcggagaacacctggcgggaaagaagtttgtgcgggataaagcatccggcaaggacattgcgcttgaaataaagcgccgactggtgccagctcgcatagccaaactgacgggcgaggccataccagtcaataggggtttcgtagtatcgcccgttgtctgcgcaatacatgttatcaagcaggtcgctggcaccactcaccggccatgggccgtcgaaggtgaatgagttcagctccggtgacgctttcagtgaggcggcgagatctgcctgctccctggcatacttcctgccgcgtgtgggtctttgtttgctcaaggttaatactccgtaactgtcatactgctgccgccttcttgtcccagcggttcgttaatggtggcaagcatcgtcgcccatgcgagatcgccatgactgacgccgcgagagcggtccgtgtcgtaagtgacaacgcctccaggggtaacgatcttgcggacagagttgaatgcaccaaccaggtcaagctcaccacgatcaaactcccagcgcccgccacgaatcagctgttgcatcttcagcacgagcattcgcttgctggacggtgagaactggtaacaaaccgctgccgggaaatgctttttaaccagctgataaaccgcttcaccaataccggtgccatcgatcccaatgtgctgcacgttgtaccgggtgagcatgccgataatgagattggcctgctcttcgaactccatccctcgtatgcgtagtgtctcaatcgtgcggaacttgccgccgggcaccatcggcacagcgttaacggatatggctccactgtcccccttgccgctggcgccgttcgggtcgtagccaatccagacgggacgatcagccatggggcgggccgcatatggccgccagtcgggccagtcgtcataaccatcagcgccgcatgccagtagcctgttatagtcaaaggcgctttcaccgcttttgatgaactggcatccgtacaggttgtcgtattcctccgggctgttctcttcccggatttcgtcgatatcagtcagatcccatccatggtcgatagcatcctgcaacgtgacaatctgcctccagatcttgtccgggcacatcaggccgctgttaagtgttttccaggatgtatcaaactcaatgcgcttgccatggctgcgacctttgttaaatgcttcacctgtccagaatggataagcctcatggctttcggctgaaggggtggagaaataggtacgcgttaggccttttagcgttgccatggcgcccgcgacttttttcaggttggcaaactggcctacccaaaagaattcgtcgaaatacaggttgcccgtgtatgactgagcggtagccgctgacgtgccaagaaaatgcagctcggcgccgttgaacagctggatcatgtcgccgcccttaagctccacgtcaacttcttcggcggccgagcgaatgaaactacgaaactggtacgcctggcggcggcttgccgataaaaagatttggttgcgctgatgcttatatttcacatcctcagacagggcgcgcaccagagcttcacgtgcgaaataccacgtcgcaccaacctgacggcttttcaggatcatacggttgcgccagtggtgattgtcataccaccctttctggtgccagtgcagagagccgagaatgttctccctcaacgcggcaatctgcgactctgagaaatagttttgctttttgcggatctttttcttcggctgggtggccgctgtgccgttatccagctttttcagctgacgggtgagcaggtcaatctctttgaaatcaccgccagtctttttgtctttgccagtgagctgaattagcctggcatcaatggatgttgtcacgcgctggatcggcggtgtggcgtcccattcatctcgctttttccatgagtaaaccgtgttctggttgatccccatcaggcgtgcgatctctgctggcgggtagccctgccagtaaagctgtcgtgcacgctgcatgatgaatgcttcttcgatcgccattaatcctcctcgcttcctgccggggagattaacccgcgcgcgcgtacccttgcgctcgctttaggttgtagtgctccgctcacaacaacaacgcgttgaggggggatgcgtccccctgccatcatctccgggaactcagaaaacaagcgagtaaacgaacatggcaggcacagcaaaaccacgtaagaagtttcgcgtggccgtctccggaaataccgttgacgggcgcgaaattcaaccgcagcaccttcgcgatgcggcagcaaattacaaccctgaggtgtatggcgcacgggtcaacattgagcactatctctctatgttcccgaatagcgattttggcgcgatgggggatgtggtagccctcagcactgaagacatcaccgaaggtgcactggcggggcgtaccgcgctttatgccgaaatcgaaccatccgagcgcatggtgcagatgaccgacaaagggcaaaaagtctattccagtattgagctgcatccgcagtttgccctcaacggcaaagcctatgttgtcgggctggcaatgaccgataccccggcgagcctgggtactgagcgtcttaaatttgcctcacagcagcgtgcatcggtgatggccttcaataaccagcagggtgaggcgccgatgttcaccgaagcgcttgaagcagaggtgatcgagctgaccgcccagcgcagcgatgaaggtgccaggtggtttaatcgcgtgatgagcattattggcaaaggtcagaaaacggacgatcagcgcttcagtcagatgcatcaggtcgttgaggccgtggcgcaatctcaatccgagcaaattgatcgcttcagtgccgcagagcaggagcgccaggaggacaaggccgctatccagaagctgaccactgagcttgcagagctgcgccagaagctggtgagcactgaagcttccttcagtcagcgaccacctgcgaacggcggcgccaacgcgcagctggctgattactgatatccactacgagagcagagaacatggaaaacaatacccgccagctgtttgatcagtacattgcgcaacaggcgcgcttaaacggcgtatcgactgcggcagtcgctgcgaaatttgcggtagaccctgcgcgtcagcagcgcatggagcaagccgcacaggagagtgattctttcctgagcaaaattaacgtgtttggcgttaaccagcagattggtcagaaagtgctgattggcagcaaaggcccgatggctggcgttaacaacagcaccaccaaccgtcgtaatccaggggctaaccattcaatggagccgtttgattacatgtgccgtaaggtcaactacgactacgggatcagctatgaacagcttgatgcctgggcgcatatgccggaattccagcccctgatcagcaaggcgatggctcgccagatgtcacttgaccgaatcatgatcggtttcaacggcaccaaatacagcgatccatcagaccgcgcggctaacccactgttgcaggattgtggcattggctggctggagaaaatccgtactgaagcctcacaccgcgtgatttccggcgtcacgatcacctcccgcgatgaagataacaaggttattgcgaaagggacttacggcaacctgggcgcggcggtgtatgacgccaaaaacagcctgatggatgaatggcacaaacgtaatcctgacaacgtggtgatcctggcgggcgacctgttgaccaccggcaacttcccggcgattaacgccatgagccagaccaacccgaacaccgaaatgctggccggtcagctgattgttgcgcaggaacgtgtcggcaacatgccgaccttcatcgcgccgtacttcccggtcaatggcgtattgatcacgccgtttaaaaacctgtccgtgtactaccagcgcggtggactgcgccggacgatcaaggaagagccggaatacaaccgtattgcgacctatcagtcatcgaatgatgactttgtgatcgaggactacggcaacgtcgcattcattgacggcattacctttgccgaggcgccggaaggtggcgcataaccgcacactggcgggcttaggcccgccgttcatcggggaagaaacaatgctgacaccggcacaacgacattttcaacgcgtcatggctgaacgccatggcaaggcagatgatctgtcagaaacggcgcgtactgcgcacgagcaaattctgcaccgcatgcgtatggatatgagtgcgctgaagaaaattcagggcgaacaggcaaaagccgcgcttaaacgccagctgctacccaattacgagggatggattgaaggaacgctggagggagacagcgggcgacaggatgaagtgatcacgcgcctgatgatttgggcgattgatattcgggattatccgctggccgtgcgcatcgggcggtatgtcatcgcgcacaacctggcaatgccagaccggtttaaccgcacggcagcgacagcgctggtcgatgagatttgcgatccgattctggtgcaggtcaaggcggatgacagcactgatgttaagccatatctggcggtgctcgatgaggtccaggagatcactgaaaacagcgatatgccagacgtcgtacgggccaagctgtataaagcccgcgcttttgcattgtgcaacggcactgcggatgaacaggcgactgcgctggatctgttgcgtcgcgcgctgaacctcgactccggcgccggggtgaaaaagctgatcgataagcttgccaggcaggtaaaaaaagcctctgcggaaaatgcatcaggcagtgaggtcgcagaccagagcgggggcgaagggggcaataatcaggctgcagcaacgccggaagtgacggtgccagctgccaaaaagccagccgccaaaaacaacaccgtaagcacaacacgtaaaacggcggcccgcaaaacaacaacgaaaaagcccaccgccgataaaaaataaccgacttgcgccccgtgcgctggcggcgcgggcggagatctgcaacgcatcgcgttagcttttctccgtccgctcaccgccaaccttttctggagactacacgatgagccttgtggcccctcgcacagttaccccctctgcggaggatgtgccggacgtggatgacggcggagagaaagtcaccgccggggagttctggcccgagatagtgctgagcaacgtccgcaaggagatgcggatcaccggtgcggttaccacttcgcgtttaaagcaggtggtcatcgaagccgtagcccacacagctgaccagctgaagcaatggcaggctgaacagattggggccggatatgccagtttggccgccgtaccggccatggtgattaacgacgagagcgtaaaggtatatcgctggcgccgcgcagtttacagcatcgctcgcgccctgctgatcgagactttccgcgatgttgacaccacgggtgacgcgggtgagaagcgcgccgccgcgctcgcaacccaggcgaatgatcactggcgtgatgcgcgctgggctatctcggatattcagggcgtggtccgtaactctgcggaggcgttctgatgaaagtgaaggcattgcagggcgatacagtggatttgttgtgtcagcgtcactacggcatcacccagggcgtgaccgagatcgtactggctgcgaatcatgcgctggccggtcagatcttccttgatgcagggcaggaagttgagctgcctgacgtcgacacctctgcgacaaaggagactgttcaattatggagctgataaaccgcctctggaactggacggtgtacctctggtcgatgctgctgacgggcgtcggcatgatgacgcagaaggactggctggctttcattgctgcgctcaccgggatcgtggttgccgtgctgggtgaactccatcgacgccggatgtcgcgcatccatgaaaccaataatgttctgctgaatgaattgatcgatgcgattcgggacgataccgagaaccggcaggatgtgaaggagttaatccggactatcagggagtcaccgcgatgaaaagaggaattattgcctgttctgttgcggcgattgtctctctcgcggcggcactctggccgcagacgctgcgcacaagtcctgaagcgcagctgaagatggctaaatacgaggattgccgaaagacgccctattactgcccggcaggtgtgctgaccataggcatggggtcgaccagcaacgtgcagaaccgcgaatacgccgagcgcgagatcgccgagcgatgggtgaatgacctgtttcgtgctgagaaatgcgtaaaccgcgagtttaatggcgcagctgcgccacaacgggtttttgaagcgctgactgatggcgcatttaacgtcggttgtggtggtcttggctggtacaccaacaaaaagggccagaaggtcagaacgacaatctggcgcaatgcgcaggatggtaactggcagggcgtttgcgagcgactcacagactttgttaactccggcggacaacgtctgccggggctggtaaagcgccgggaagagtttcgggactggtgcctctcagagcctgagctgaagggggcgaaatgaaagcgctgggtgtgttttccgtttttatttcccttctgctggtcatcgcaggcgtcaggctgacgctggagagcagtaaacgagaggccgcagagacggcccttggagaagccaaccagaagcttaagcaaaccggtgatgtgctggccgagatcagggcgttacgtaacgacgtgaacgaagtggccgctggcctgaaaacactggctcagaagcgtagcgatacaggggaaaagcgccgtgaaaatatcaaaactgagctggccggtgataaatgcgccgctgtgcctgtgcctgaccgtgtggctgacagcctgtaccagcgagcagccgaagtcagcgccggtgattattcaggaacctttaccggaaagcctgacggcaaaaactgaaacgccagcgccaccaaaaccaatgacatacgggagtctcgctccgtggtctgatgcgctgctggatgcgctggacacatgcaacgccgataaggcgggcatcagagagctggaactgcggcgaatcgccagggggataaagtgaaaaaagcagaattgatgcgtgaagccctgatagccggtaacacatggtgtaaggccaacccggagcaaatcaccgtctgggtggaaaaaggcaatatcgggattgaggcgaccggcgaaccgtctttcatgtacctctacactatcaatattctcgccgtggaattccccggggcggttgatgacctgatgctgccgatcatggcctgggcctggcaatatcagccggatttactgctgaatcctgacaataaccgcaaggttgagtttgacgccgacattatcagcgacgacctggccgatcttctgttcaaggtgccggtctgggagcgcgtcatggtggaaaccgttgacgggaagcccgtcgcgaagcacctgagtgaagaccgcccgcgcatctatggcggtgagtgggaagtggtatttggcggaggagagctggcatgaccgatgatgcagcgctgtttcatcaactcgatcaggtttttgcagacatcctgtccgcaatggcgccagcacgccggttgcgtacagcacgcggaatagcgactgccctacgtcgaagtcagagccagcgcatcggtaagcagacgactccggatggtacgaaatacccgaagcgccgccgtcgcgtactgaagtcacgcgctgagatcggctttatctgggaaggggaagagcgccatctgcgcaactggcgggcaacccgtggaagtcgcgggcgtatgctgaccggatttgatgaagggaaaggtgccgtacgttcgttctatcgtgcggatattgagcgttaccttgagctcaacgccagcgagacgcgccgcgataccacgaaaagtgatcctatgtttcgccgactgcgctcagctcgttttctgaaagcaagcgccacttctgagggggctgcagttggtttttctggtgcggctgcccgcattgcccgcgttcaccagtacggactgcgggaccgggtaaacgacagtggcgcgatggcaagctacccgcgccgtgagttgctcggcctgaacaaggcggaccgcatggctattgcccggcaggtcattgattctctgggggtgagctgatggacctggctgaagtcattcgcctgctggaaaacatcgttcgcaccggtacggtgacggagattgacgaggaaaagtggcgggtaagggtaaaaagcggagagctggattccacctggctgcgctggaatgcacagcgtgcaggcgctttcagcttctgggtgccgccgtctgttggcgagcaggtatggttcctgtgccttgggggtaacactaccgctgcgatcatcgggggaagtctttacagcaacgacaatccggcgccaggtatatcggcaaaagaaatgatcgtgaccgcgccggatggagcgaagtttcgctatgacgcagaagcaggggctttgcaggtcagcggcatcaaatcagcaacgattgaggcgtcggttaaggtcttgctgaaaacgccgctggtcgagtgtaccgagatgctgaaaaccaaaaatttcaccgttacggaaggcggcaaaatgcagggggactttacgcacactggcggtgcgttcatctcaaacggtgtccaggttgatgatcatggtcatggtggcgtgcagcgtggcggaagctggacggagggcacgcgatgacggtgcgttatgccgggatgaatcctgatggcacgggaacgctgacggacgccgcccacgtgtggcagtcagccagtgacattcttaacaccccgattggatcgcgagtcatgcgccgtgactacggctctctcgttcctgatctgattgatggcccacaaaacgacgttacacgcatgcagctgatgagcgcagtggttattgcgctggcgacatgggaaccgcggatcacgctgagcatcgtggatgtgcgtttttcgcagtccggagcagtggaggcgggattgtcaggggctctgactgaatctatggaacagcagacgacaaccttaacactcaggaaaagcagcaatggcaacagttgatttggcgcagctaccgccgccgcaaattattgaggtgctggattttgaagtgattctggcggatgtcaaagccgtcatgatcgcggctttccctgatgaacaacagccttctgttgccgctgcgttaaagcttgagtctgaacccctgaccatactggcgcaggtgattgcctaccgggaattaatgctgcgccagcgaatcaatgagggggctgcggcctgcatgttgagccattccgtctccaccgatcttgataaccttgcgggtaacctgaacaccgagcgcctggttcgtattccggctaccgaaaccaccgatgctgagatggaaagcgataccgcactgcgcctgcgtgcgcaatccgcttttgaagggttgagcgttgctggccctaccggggcatacgaatattttgcgaagagtgccagcggtaaagttgcagatgctaaggcaaccagcccttcacccgctgttgtcgtcgtgtccattctgtctaccgaaggggatggcacggcgagcgacgagctgatcgcaacggtaaacgacacgctctcagcggatgataaacggcctgtcgccgaccggctaaccgtccagtcagcggagattgtgaattatgaaattgacgctctgctttatctctatccggggccggaatctgagccgatcctgggtgcggcagatgatgcactgcggacatggctgggagcgcaggggaaaatcggtcgcgatgttgcgcgttcggccattatggccgctctgcatgtgcagggggtgcagcgcgtagtcttgctgaatcctcaggaagatatcgtgatcgatgatacccaggcggcacgatgtatttcgcacaccatcagcgcagggggaacggatgaataatagcctcctgccgccttcagccagcactttcatgcggaatgcggagaaaccggcggcgcggatcagcggtattcctgtcgaccttcgaaagctctggaatccggatgaatgccccgtggagtttttaccctatctggcctgggcgctgtctgtggatcgctgggataagcgctggtctgagcagaccaagaggcaggtaatcaaagcctcctggcttgtccatcgccacaaaggcacgatttcggcgctgaggcgcgttgttgaaccttttggctatttgctgagggtgattgagtggtggcagaacggcgaggagccaggcactttccggcttgaaatcggcattcaggatgaggggatcaccgaggaaacttatcgggagcttgagcgcctgatcgacgatgcaaaaccccgaagccgtcacctcaccggcctttcgctttcgcttcagtctcagggttatatcgagacaggggcggggtgttacgtgggcgatacgctgacggtatatccctattttcctgaaactatcgctgtgggtggcaatgactataccggcgcagcaatccatttaattgataccgtggagatcgcaagtggcgactaaatatcttgccctgttgaccaatatcggggcggcaaaactggcaaaagccacggcgttgggtacgaaagttgagattacccagctggccgttggtgatggcaatggtgtactgcctacaccgaatccggcacagactgccctcgtgcatgagttacgccgcgcccctttgaatatgctgacggtggacccggcgaacgccagccagatcattgcagaacaggtcataccggaagacgtcggcgggtggtggattcgtgagatcggccttttcgataaagatggcgatatggtggcgattgccaattgcgctgaaacctataagcctcagttgcaggaggggagcgggcgcgttcaggttattcgcgtgatcctgattgtcagcagcaccgaagccgttacgttgaagattgatccggctgttgtactggcaacacgccagtatgttgacagccagctgcgcgcgcatgagcagtcacgtaatcacccggatgcgtcaacgacagagaaagggtttgtgcagctcagcagcagcgtgaccagtgacagcgaatcgcaggcggcaacatcgaaggccgttaaaattgcgatggataacgggagtgcacggctggcaaaagatcgcaacctgtcggacttacccaataccgcattagcacggcagaatttagagctgggtgacagctcgacgcgaaatgttggaacaacggccggaacggtagcctcgggggatgatgctcgaattaccggggcgatgcagaaaagccaaaacggcggggatattcctgacgtggcgaagtttctccaaaaccttggtttctcagaatatataaaaggcttgattggtaaggatgatgaatggtctacctggcaatacctcggcttagttgatgcgcttaatggtaaacaacagtcggatgaaacattgacggcacttgccgggttagttaatggcgcaaataagctaccgtatttttctggagtagaccagatggctgcaacagacctgacagctttcgcgcgtgggcttttgggaaaagccgatgcagctacagctaaagcgcatctgggcgtgggaagtgctggcagcagaaatgttggaactgggttcagcgcaggtggtagtgaaattcctgatatgacgtttttttcggggttgaaaggcgctgcgggatatcagtattttccaaccggcatgcttctccagtggggaaccgtcgttctgaagtctgcaccgtcaggagtctcgatcgggacattccctgtcgcatttcctgcggccgggcagcagatatttgttacccatgataatcctctcgccaacgtgatggcatttggtgcagccagtattatcgatccgacacaatttagagttaatgccattgcaatcaatgctgacacattcactatggcgccgggatatagcctcaccctgcgctggttcgcaattgggagttaataatgacaattaaattcagtgttaaaacacaggcattttatgatgataatacagatgctatacccgatgatgcagcagttgttacccatgagcagcacatatcgctgattagtggtatgaacgatggtgagagacgtgtttacatcggcacagatggggagttaacactgtcagacagcaagccatctcaatggcatacctgggacagtgataccaatgagtgggtcatttctgcggatgcgcaaattaaattagctgacgacgagaaatcccgcttaacccaggaggcaaacgactatataaacagtaagcagtggccggggaaagctgctatgggtcgattgaaggatactgaaaaatctctgtacaacatatggctggattatttggatagtattgaagccgttgatgtatcaacggccccggatattaaatggcctaaacagccggatatgtaggccactcgaaagcgggtgcttttgatgtatcaacacgcatcagctgcacccgatatttttttccagtcagtaagctgtttaatttcttcatctgtcgcaataccaaggtcggaagcatcctgtagttgcgaggcgtttaaatttgcacagtgcgcaatagcggtatttcgcacgcttgctgcggtgcataattttatgcgtttcggtgcgaaaaaattcgccgcgctacacctgacagacagcattgatacctcaacacctatggggcgctttttctttcacgtcatgggggcgctggcagaaatggagagggagttaatcgttgagcgcacccgcgccggtttggttgcagctcgcgcagaaggaaggataggcgggaggcgaccaagactgacaaagcagcaatgggaacaggcgggaagactgatagccgcaggggagaaacgacagcgggtggctataatttttgatgtcggaatgtcgacgctttataaaaagttcccttcagcaagaagggaacatgaaggggcttaaggcatcactaaaacagaccgttgagcgagtctttcacctggtttatcgcattatttgcactcgtctttaacccggccagggcatcgctgacggtcgagctttgcagcttctccctgtaatccgcatcgacacggctcaggctgagggtaaattcgattttttttggattcccaaaccggtcgaactcggacttgccccgctccagacgtgttaaaacgtacataccataaatacgccccgtaccctcaataaggggccatgggcgccctgcgtagccgatagtttcaagggctgacagcgagagatttccaccggtgatttccgggtaaaggacgcctgacagcgttatattgtcatcaccggccccaatgtactgccagccagctgactgattaacccgatcgttttttacgtgcctccactcctgcgagtgctggagttgctggtaaggggtggtgcgcagcataaaaacgaacattccaaaaaccatcatcataatcgtcacctaatctctgtcgcggaaagaaccacggttaattctgccggtgctggccattgcatcacgcacaacattgcgcatcattctttccagctcctgatccgtgcgcttaccaacatcgttaaaggtaatgttaaaaattggggcgccgccggtcggagcggtaacgggagctgataccggggcctgtgtggctgctgtcgctgaaataatgccgccagctgcgggtgttgccactcgcggtactgattgcggtgtaacgcgtgcttcctgatatgcgccacgcaaagccagagcacgaggcaggtttttgaaaataatgtcacccggcccgactttcttggtgttgtcagcggttgcttttgtattgtctgcgatgctttgcaggcgtcgttgcgtaccggtatttcctgacagtggcgaggccgcaggtggtgcgccggtagtaactggcgactctgcttttttgggggcgactttagccatatcaccggcaaggaaagccactttatcctgaaggagggcggagcgttgcgcatcttcaattttcttgcgcgccctctctgcttcatcgggtaatacaccaagtttttcaagtatccagcccagggtatcaagaagcatcctggctggggtcaggacgagatttattgcaccgccgagcacgttaccgaagatcacgccagcactagtgcatttatcaagcgtctccttgctggtctgcactggcgataagaggtttgtaaaccactgccagacggatttaaccccatcggcgatcatgttaaaggtatctctgagaggggaaattgcctgcataaatccggtaaacataccgaggaaaaacgccttaatgggttcccagtatcgccagattaacaatcccgcagcgacaaatgcggcagcaatcaggcctattggactgagtaaaaaagataaagccccaccaagaatagaaaccgcaccggtgatcatgccccagattgctggtaagcccgtaaggcgcaacagcaacatgccaatgtttttagtcagcgatcccaaaagtgcaccaggagaccggaaggcagtaagcagaccagagcgaaccgcagggagaatagctgaaattcttccaagtttaggggggattcctgacagtaagacggaccaccctctgacgttcgccatggctgggcccgcgacagtgccgagagtgcgaaaagctgcaatggtgccgagtagcccgcgaccaccggtcagcagtgaaaaaccgagctgaagtttggtaagggggccaataagaatacccatcgccagtgacgcagcgccaattgccgcaaccagtgcgagtgctccaccgacaaccagaatgattgtttgtgtcaggcgggggttttcttttacccaggtgctggcagcggtgatcatatcgctaagcccctgagtgagagagcgcagagggccgtcggcagtctcctcaacctgaatgcggaaaccctcccatgcgctgtccaggtttttcagatcaccgctgaggttgtcagccatgaccttcgctgccttctgagcttcaccctgagagccgcgcaaatcggcaaggagtttttgcagctcaccgctaccagccgatcttacaagtgcctgaaatgactttgctgcttcctcgcctgctatgtctttgaagaatgacagctggtctgtgtcgccgtactttttgatagatttataaatatcagacaagaccacttcggcaggtcgcatttttccggtggcatcggcaacagaaacgcccaattctttcagggctgcctgagctttgcctgttggtgcagccagacgcgaaaaggtggtttgcaggccagtacctgcaatactgccacgcaggccaacgttcgccattacaccgatcatggcggttgtgcgctcaacatcaacgccaagaccggccatcccggttcctgcatacttcatcgcctcaccgatgttcattaaatcggtgttagtacgggtaaatgctgcggtcaaaacatcactgacccgatccatttcctttggatcgagacggaattgcgaaagaatgttggagctgatgtcggcactttcaccaagatccatgccgccagccagcgccatattcagaacgccgggcaatgcagcctgaatggcttctggagtaaagccagccattgcaagaaacgcctgcccgctggctgcatcgcgtgaggtgaatgcggtttctgcaccgagttttttagcctgcgcgcgcagatcccccatctgggaagagtctttattaaggcgggttaatgcctggacgcgtgacatttcctcatcgaaaccaatcgcaggcgccaggaatgatccgccagcgtaacccgcagcagcggtgccgagcatcatccccatacccgccccgcgaagtttgcccgcagtctcttttgctcgatcgtatctggcctgggctttctgggtagcggccagctggcgacgttcgcgctcaagtgtctggttgtattgctccgtgcgcctgatggcactctgaatggcgccgctgccggtggtgaggttaacgccatgctggcgcactgcctgcgcagctgtacgcagctgcgtcgtttgcctgccgtaggtttcagtcagccgggaaagtttggtgcgaagtgactcaagtcgcgccgtctgggcttcagtaagctggccgccttcgcgttgtttctggttgagaccgtcaaaggcccgctgggtgcttttcagcttctgcgcagtgtcattggcttgcgagcgcagcttatcaaatgacgttgcgcttttttccaggcctttgatggaggactgtgtttttttgagggagtcggaaaggccgccaatggctttactggcggcgctgaccgggcgggtgagcttgtcaattgcactgaacgcaacgcgaatactaagatccatcgtcgtcatcctccttctcatggttaccgcttctgatggccgcccgttcgcgccaggccatcagctcgcgcaactccatgctgtgcatttcggagggcggccagtgaaatatcacagcgatgtcagcgatcagatcatcgacatcgctgaatactgcctctcttacttgctcgccgtcgccgcctcgctcggtacggacggcgccgctttcgtcaaaaaaggcgtgatttcttcgcacagcgccgtaaagtcgccggtcgccattgaggaaatatcggcggttgtcagctgaggcgtggtgacgcgagtcaacagagttgataccgcgtcatagtcgaagttgagaacatcaaccagacgcagcccgcgcagtgagccagcctgcttgattgtgtcggtgattgcgacggatttgatttcctggtcgccgcgtttaatgggttggctgagagttactgacattattcattctccgggcggccatgctggccgccattggtagtggttaaaaaaagattactggccgagacccagggcggacgcaatgcggtccgggtagagactcttgccgttgcgcttgtagatgaagttcagcaggtcgatttccagcaaaggcttgtcatccacggagagcttgtaatacgtatttttgagcgcataagtatggctggtgtcatcaccctgcttggcttcgccctggtcaacttcggtaatacgtccgcgcatctcgacctcaagcagggaacttgttccaccgctgtagatttccccgacaaagcgcgtgcgtagttcgtcaatatccccgccccatttcaggatcagctcctcaaccatgccgccaacaaccattgatgcatccagtgcacctgaatcaaggccgaggtcaacagcagcggagccaagcatcccgccaccctggtaatcttccgttttacgggtaattttcgggagcgtgacgctggggatcttcccgatgtagttgtcgccatcgacaaacatcgtgaacaggcggagtttcttcggaatagccatttacgcacctcccagcgatgcaaaggctggttcgtaatactgatcggtaaacgtctggatcagcgtcaagttttccagcggtggtacggggctgtagttgtagcgaacaacggctttaccctggcgaataccggtggtcgggttatcgacaatatcaaaccagcatgctgcaccaatcagtttgccagcagtgaccagcgcctgaagcttggcattgatcccgctcacaacgtctttgacgttagccggggtaagcggtttgtccacggtggtgaactgtgcttccgcaatgctgtccgccagaatttgggccgtacgggtaaacacctcgaaaatatactcttcggtgtcggtggtgcggttcccccagaaccggaagccgtcgcgtttgatcagcgtggtaatctcgttggcgttcagctcgttagcgtcggagtcctccgcctgtaaggcccagaaaacgtctttggagatacccaggacgttcttcaccgcaacgttagaaagtgacttgtgccagccctgctcattgtcaatcagtgcccgcaggccaagcgcataggcaaccgccgggaattcttcattaacgccggtctgcgggttgaaggcgatgaagttgggccaaatcatcatcccttcacgctcggcgaactgctcgcggtaggttttcgcttcggcgatagtctcgcagccatcgcagtagctgtaagagaatgcacgcagctgcttcgcaattacgcgcagctgtgcggtcacttcctgcgtgtcgtacatcggaataccgaggatgcgagggcgataaccggttttctgctctgcggtcaacagggcaaacatcccggtatagcttccgtcagcctgcgtgccaccgataatgagctgggattgagttttggcattttctccttcctttgcttcagcgacacgaacaacaattacacgtgtgctgacctggtcggagatagccttgagagatttatacagtgagcctgttttgcccgccttacccagcacgctaatcacgcgagtgatcaggactggcgtatcaagtggaaaggtgaggggatcggcatcatcggccaccgcaaccagaccaatgaccgttgaatcaatgtcattgatcgcggtctggaggtcggtgttttctttggtgcgcgccccgtggaaaaagttgtcggtcatactctaccgccatcatgtttagtgagttcatggtgatattcgctgaattccgtgcggcagacacgttgcgatggatgtcgcagaaaggcgacaacaaaaggctgtttgtcctatcgcgcgcgcatggaaatatttgcgggaggagaaagcgatggcactgacaactgacgcaatagagagcgcaaaaagcctgctgaatgcaggtgctgagaaattcaaaaattatcctggcgacctgtcacgtgtgccagcgtttaacgtcatgcttggcggcaaggcgctgatcatgctggatgagaaaatactctcgttagaattaacagataacaggggctttaatgctgatgaactgactatcactgttgatgacagccagggagatattgagttaccgccacgtggcgctgaattatcggtagcgataggctggcagggagaaaaactggtacataaagggattttcatcgtggatgaaattgcgcactcagggccgccggaccgtatcgagatcacggccagaagtgcagatttccgcgatgaatttaacgttaagcgggaggtgtcgtggcatgacgttacagtagagcgcatcgtctctgctatagctcacaggtacaagttaaaacctctcatctcagagcaactgatgtccgctgagatcgaccatgcagatcagacacaggaaagcgacatgtcttttctgacgcgcatggcggaaatgctgggcgctattgcaactgtgaaaaatggttacctgctcttcatcctgcctggtggcggtgtcagcgcaaacggcagagcgttgccggagttttccatcacgcgcagcagcggagatcgccattctttccggattgcagatcgcgacgcatacactggcgtgcaggcgtactggcttgatatggaattcgggaaaaagaaaaaggtcactgttaaaaagcggaagaaaaccgcagacaaaaagccgcgcagcagcagccgggaaggggactatattgccggtgaagatggtaacgtttttgtactccgtacgacgtacagcagtgagatggccgcacaacgtgcagcagctgcaaaatggcaacaactccagcgcggagctgctgagttctctttaaccctggcttacgggcgcgcggatctgtatccggagatgcacggaacggtaacagagttcaaagacgtcattgacggccaggactggataatagcgaaggcaagccacactattgacgatggtgggtttaaaacacgtctggagctggaagcaaaaatacctgaatggattgcagaaaccgaatcatagcggccataatatgagcgagttcaactcccgccatgggaggccattatgtttaagtgtcctgtttgtggtgccgtcgcacgtacgcgcaccagtcgccctcttagtgaaatgacagtccggcattatcaccagtgccagaatttcgaatgcagtattacgtttactacgctcaacagcgttgagaaactggtaaccaaacgcgccccccgcgaaaagttaccggctgatttcatcccatcagatgccttccccgcttcgcattatggaagcagtcaactcagcctcgcagtatgaagaaaaccccgcatttgcggggttttgcttgagaagcaatcagcagaaaatgataattaccgctcttaccaatggaagtggggaacgaaaatgagaaaaaccatggttttactggcattaatcgggctcgtagggtgtaagcctagtgttgataaggctattgaactggcgcagaaagaggttgccgcggatacaagagatccagatagcgcaaaatttcgatatatgcgttttgtgcaaacagaagaaacaaaagatggtgaggttaaggggatcgtatgcgggcagctgaatgcgaaaaatgggtttggggcttacgctggtttttctcccttcctggtcgaaataaacatggttcctaagggcgcattctcaaagggtgtaacctactcaatcttaagaaaagaaatttacacaggtttagatagaacgacgccaaaagattacgagaaattgtgcggcccagaagagtcggccgcacaatagaaggccactgttacagtggcatttaaatgtcgatatggtcacagtgtggacactgtatgataaaaatccttttttatcagttggatggcagcaagcttggcgcaccatccctgtcttcccccacatgatgtgggggttttttttgccccacattctgtttgttaaccgtttattcatccttcgactccacatgcttccgttatactagcggcatgacatgacaggagcgtttatgaatcaatcctatggaagactggtcagccgggccgccatcgcggcgaccgtcatggcatccagcctgttactgattaaaatctttgcctggtggtataccggctcggtcagtattctggcggcgctggtggattcgctgatggacattgccgcctcattgaccaacctgctggtcgtgcgttactcgctgcagccagcggatgaagagcacacctttgggcacggcaaagcggagtcgctggccgcactggcgcaaagcatgtttatatccggttctgcgctgttcctgtttctcaccggcattcagcatctcgtctcgccgacgccgatgaacgatcctggcgtcggcgtcgttgtgacggtcgttgcacttatttgcacacttgttctggtaacgttccagcgctgggtggtacgcaaaacgcaaagtcaggccgtacgggcggatatgcttcattatcaatctgatgttatgatgaatggggctattcttattgcgctcggtctggcctggtatggctggcatcgggccgatgcgttgtttgcgttagggattggtatctatattttatatagcgccctgcggatggggtatgaagcagtgcaatcgctgcttgaccgcgccctcccggactcagaacgtaatgaaattttttctatcgtgaccgcctggcccggcgtcagcggtgcacacgatcttcgaacgcggcagtcagggccgacccgctttattcagattcatattgaaatggaagacaacctgccactggttcaggctcacgtgattgctgagcaggtcgagcaggcgattttgcagcgttttcctggttcagacgtcatcattcaccaggatccctgctcggttgtacccggacatgttgggctttcgtaattcgttgtaaaaaagtgagccaggccagcattttgtgtataaattaccgccatttggtctgacctgaatcaattcagctggaagggattgatatactatttgcagtattcgttggtcgataagtttcttccggcaacagatttcaattttgcattcctaagttcagaggtagtcatgattaagaaaatcggtgtgttgacaagcggcggtgatgcgccgggcatgaacgcggcaattcgtggggttgtccgcgcggcgctgacggaaggtctggaagtttttggtatctatgatggttacctgggtctgtatgaagaccgtatggttcagctcgaccgttacagcgtgtctgacatgatcaaccgtggcggtaccttccttgggtctgcgcgcttcccggaattccgtgatgaacacgttcgtgaagtggctatcgagaacatgaaaaaacgtggactggacgccctggtggttatcggcggtgacggctcgtacatgggtgcaaaacgtctgactgaaatgggcttcccgtgcatcggcctgccgggcactatcgacaacgacatcaaaggcaccgactacaccatcggttacttcaccgcgctgggcaccgttgtggaagcgattgaccgcctgcgtgacacctcttcttcccaccagcgtatctctatcgttgaagtgatggggcgttactgcggtgacctgaccctggctgcggcgattgcgggtggctgtgagtttgtcgtggttccggaagtggaattcagccgtgaagatctggtagctgaaatcaaagccggcatcgcgaaaggcaaaaaacatgcgatcgtggctatcaccgagcacatctgtgacgtagacgagctggcgaaatacatcgaaaccgaaaccaagcgtgaaacccgtgcaaccgtactggggcacatccagcgtggcggttcccctggcccgtatgaccgtattctggcgtcccgtatgggtgcgtacgcaatcgaactgctgctgcagggccacggcggccgctgcgtcggtattcagaacgagaaactggttcaccatgacatcatcgacgcgattgaaaacatgaagcgtccgttcaaaggtgactggctggactgcgcgaaaaaactgtactgatcggcgtttggtttgtgccgggtggcggcttcgccttacccggcctacaaaagcacggttcgtaggcccggtaagcgaagcgccaccgggctttttttgtccgcaccatttgcctttttattccactacgttatagccaatctttttttattctttaatcctcgattcgctttctggcacgctgcattcatcaaaacactacacaagagagctgggcgatgaataaatggggcgtgggtttaacattattgctggcatcgaccagcgttctggctaaggatatccagttactgaacgtgtcatacgacccgacgcgtgaactgtatgaacaatacaacaaagcgtttgcggcacactggaagcaggaaaccggcgacaatgtcgtggttcgccagtctcacggtggttctggcaagcaggcgacctccgtcatcaacggtattgaagccgacgtggtgaccctggcgctggcctacgatgttgacgcgatcgccgagcgtggccgtatcgacaaaaactggatcaaacgcctgccggataactccgcgccctacacctcgaccatcgttttcctggtacgtaaaggcaacccgaaacagatccatgactggaacgacctgattaagccgggcgtgtcagttattacccctaacccgaaaagctccggcggcgcacgctggaactatctggcagcctggggctatgcactgcaccacaacaacggtgatcaggctaaagcccaggaattcgtgaaagcgctgtacaaaaacgtcgaagtgctggactccggcgcgcgcggtgcaaccaacaccttcgtggaacgcggcattggtgacgtgctgattgcgtgggaaaacgaagccctgctggcgaccaacgaactgggtaaagataagtttgagatcgtgaccccaagcgaatctattctggctgagccgaccgtctctgttgtcgataaagtggttgagaagaaagacaccaaagcggtggcggaagcctacctgaagtacctctactcgccggaaggtcaggagattgcagcgaagaacttctatcgtccacgcgatgcggctgtggcgaagaaatatgacggcgaattcccgaaactgaagctcttcaccattgatgatgttttcggtggctggacgaaagcgcagaaagagcacttctctaacggcggcacctttgaccagattagccagcgctgaacataaataaacgacacggtgacccggcgtgagaaatccgccgggttttttatttggtcatcattttgcgttactcttttgcctctattgaaaacagggaacgcgttgtgaaaaaaattatcttattgatcctcattgtcatcgcccttgccgctggcggctggtactggatgaaagcgggtaatccgaatgcgttgcgacatatcgttctcgaccagtgcctgccgaatcaactgcaacaccgtaacccggcaccgtgtgcgcaggtgaagcctgacgcaggctatgtagtctttaaagaccgcaacgggccgctgcaatacctgctgatgccgacatatcgcatcaacggcaccgaaagcccgctgttgaccgaagcgcatacgccgaactttttctggctggcctggcagtcgcgtagctttatgaccctgaagcgtggaagcgagatgcccgacagcgccatttcactgacgattaactcgccgacagggcgcacgcagaaccattttcacattcatatctcctgcctgcgcccggacgtgcgcgagaagctcaacgccgcacagggagaaatcagcacccagtggctgccccttcctggcggcctcgaagggcatgagtatcttgctcgtcgggtgacggagaatgaactggtgcagcgcagcccgttcatgatgctggctgaagagctgccggaagcgcgcgaccatatggggcgcttcgcgctggcaatggcgcagcagtcagatggttcgtttgtgttgctggcaaccgagcgcaacctgctgatgcttaaccgcgcgtctgctgaggaactgcaggatcatcaatgcactatcctgaattgaccccaccataaatagcgtttactcgccctgcctgtcgccgtagacttgctgaaaaattctacaggagacaggtatgtcgctctggtcaacgtatcctctgttgctaccttcactgattgtgggcgtcaccatcgtactatgggcgacgtcgctattgccggaatttatcaccgcgctgctgttcttcacggcggcaatgaccgcgaagatcgccccgccggagacgatcttcggtggttttgcctcgtcggctttctggctggtcttcagcggattcgtgctgggcgtggcgatacgtaaaaccgggctggcggaccgggccgcccgggcgctgtcggcaaagctcaccgactcctgggtattaatggtagcgagcgtggtgctgctgagctatgcgctggcgtttgtgatgccatcgaatatgggacgtattgcgctgctgatgccgattgtcgccgcaatggcgaaacgcgccggtatcgctgacggctcccgcgcctggtttggtctggcgctggcggtagggttcgggacgttccagctttcggcgacgattctgcccgctaacgtgcctaacctggtgatgagcggtgcggcagaaggttcgtacggcatccacctgaactatgtcccgtatctgctgctgcacacgccggtgctgggcattctcaaaggcctgatcctgattggcctgatctgctggctttttcccggcagcccaaaaccgccgaaggaacaggcgccgtctgaacccatgggccgggatgaaaagcgtcttgcctggctgctggcgatagtgctggggatgtgggtgacggagagctggcacggcgtggggcccgcctggaccgggctggcggcgtcggtcatcgttatgctgccgcgcatcggttttatcaccggggaggagttttctgcgggggtgaatatgcgcacctgcatctacgttgccggtattctggggctggcgatcgtcgtgacgcaaaccgggatcggcacggcggtgggcgaggcgttgctccgtattatgccgctcgatgcagaccgaccgttcaccagcttccttgcgctgaccggtattaccaccgcactcaacttcatcatgaccgccaacggcgttccggcgctgtataccaccctggcgcagagcttctcggatgcgaccggcttcccgctgctgtcggtgatcatgattcaggtgctgggctattctacgccgctgctgccgtatcaggcgtcgccgatcgtggtggcgatggggttaggaaaagtgcctgccagggcggggatggtgctctgtctggcgctggcggtggcaacgtatctggtgctgctgccgctggattatctgtggtttagcctgctgggacggctgtaaaaaagcccggtggcgctgacgcttaccgggcctacataaccgtagggcgggttagcaaagcgccacccgccacaaaggcaattacgcctgtttagccgcttctgctgctttaacgatcaccgcgaaagcgtccgctttcagggatgcaccgccaaccagcgcgccgtcgatgtctggctgggtgaacagctcagcagcgttagacgcgttaacggaaccaccgtactggatgatcacttgctcagccactttggcgtcagctttcgcaatgtggtcacggatgaatttgtgaaccgcctgagcctgcgcaggggtggctgatttgccggtaccgatcgcccagactggctcgtaagcgataaccgcgccttcgaacgctgctgcgccctgcgttttcagcactgcgtcgatctgacgtgcgcacacttcttcagttttgcccgcttcgttttctgcttcggtttcaccgatgcacagaaccgggatcagaccctgctctttcagcacggcgaatttcttcgcgatgaactcgtcggattctttgtgataggtgcgacgctcggagtggccgatgatgatgtatttcgcgccgatatctttcagcatttcagcggacgtttcaccggtgaacgcgccagacaggttaacgtcaacgttctgcgcgcccagaatgatgtggctgccgtcagcggcacgtttagccagatccaggtacatatccggcggagcgatagcaaccgcgcagccggtcacgccagccagctctttacgcaggttcgcaaccagttcgtttaccatgtggcggctgccgttcagtttccagttacccatcactaaaggatgtcgcatttcaattctccacgctcaataagcgaattaaggaatatggccaccctgtcgggcagcatggtctgtgaatcagtatagagattttccctcgaaaggctttgctttttgtcattaattcgccccgccgagagtgtcagatagtgccagcttaatcggttcaacagcgaaggtcagtcctttttcgccgttgtccgccaccacatagcggattgcgccttcggtatcggcgtagtaacgcttgtttttaccggcggtgaggagtttttgcagcttttgctggctttgctttttcgtcagcgcaggggtaaacgcctgcaggaccgcgctcatgtactccagcgctttcgccttcgcggctttctgctctggcccttgtatcggcagccaggtgatttgcatgcttttgatttttaacgtcccgcgctccagcgccgtggaggcatacaaattctcgttaatcttgcttgccgcacgggtcagggtaggcgtgtcgcgggggccatcaatggcacgaaactcatccagttgcagcgtgggattggcctgattgaaggcttcacgaaactggctgatggactgatcgaacgacggtgcgcccgccagcaggtacggtgctgtggtcggggctgtggtttcggcggcgtgcagggtaaaacccgcgctgagcagcgctaaacacaggaatagagaatgtgccgaacttttcatcaacattgcccctggccgtaagtgctcatgattaaaacgatatctggtcggcttgtcaaaaggtcacaactccagggtaaaatgcgggctaaacgataataaggaaccttacatgaccatacagcagtggctgttttcattcaaagggcgtattggacgccgtgatttctggatctggatggtgacgtgggttgtcgccatgctgcttctgtttttcgtcgcctataacgcgtggctgagcacgcaaacggcggccttcgcgcttgtctgcctgctctggccaacggcggctgtcgtggtgaaacgcctgcacgatcgcggtcgttccggcgcgtgggcatttctgattattctggcgtggatgctggtggcgggaaactgggcgatgcttccgtccatcctgccgtgggtggtgggcaggctgctgccgtcggtcatcttcgtgatgatggttgtcgatctgggcgcgtttattggcacccagagcgaaaacaaatacggtaaagacaccgttgaggtgaaataccgctgatcaccagtagtgttcggcggtcatatggcccggtcggcggcgaagatgtttcgtcatctgccgggtatccttcagaagctgctgcgtgtcgcgtaccatctgcgggttgccacacagcatgacgtggctggtttcagccgtcatcggtaaacccaccgcctcttccagggcaccattctcaattaacgccggcacgcgaccggtcagcgttcctgctacggtttcgcggctgaccaccgtctgaatctttaactttccgccgtactgctgttccagcgcctgcatctgcggcaggtagctcaggtctgcggcgtagcgcgcagcgtgaaccagcacgatgtttttaaatcgctccaggtctttgccgtactgcaaaatagagagataagggccgatggccgtaccggttgccagcatccagagcgtgtcacaatccgggatctcttcgagcacaaagaagcctgctgcttcactcacgatttgcacgtcgtcgccgggcttgagggcggcaaggcgcgggctgagtttaccgtcaggaacggtgaccagatagaactcgagatccgggttatcaggcgcgttaacgtaagagtaggcgcgctgcacgcgctcgccgtcgacatccagccccagcttcgcaaattgcccggctttaaacgggtggacgggagcatgcagggtgagactaaatagcgcatcggtccagaactgtatctttgtgactttacctgttacccagtccgccatgatcttctcctgtgctgtttctctgttctatcttccgtacttaacggggagatttccagcccatttgggccggaaagctctatcgatcaaacggttttacagaatgtgcgtctgtacgtccgggtctttgcggtcgagatagtggatagactggatgcggcgaatggtgcgtgattttccgcggatcagcagcgtttcagtggtggccatattgcccttgcggctgatgccgtccagcagatcgcctttggtgatacctgtcgccgagaagaccacgttatcgctacgggccatatcatgcagcgccagcactttgttggcctcgatgcccatcgcttcgcagcgtgccagctcgttttccccgatacggcggttctcttcgctgtcgcctttcacctcgtggcggggcagcagacgagcctgcatatcgccgtccagcgcgcggatcactgccgcagagactacgccttccggcgcgccgccgatgccgtacagcacgtctacttcgctgtccggcatgcaggtcaggatcgaggcggcaacgtcaccatccggaatggcaaacacgcgcacgccgagcttttgcatctgcgcgatggtggcgtcgtggcgcggtttggccagaatggtgacggtgagttcgctcagcggtttgttcagcgcgctggcgacgttacgcaggttctcttccagcggcaggctgaggtcgattgcgccttttgcgccaggaccgacaatcagcttttccatgtacatatccggcgcgttgaggaagcagcctttatcgcctacggccagcaccgccagggcgttggcctgacccattgcggtcatgcgcgtgccttcgatcgggtcgacggcgatatccacggcatcgcctttgccggtaccgactttttcaccgatgtagagcattggcgcttcgtcgatctcaccttcgccgatcacgatggtgccgtcgatgttgacctggttaagcacaatgcgcatggcatggacggctgcgccgtcggcggtatttttgtcaccacgccccagccacttatagcctgcaagggcggccgcttcggtgacgcgggaaaactcgatagcaagttcacgtttcatgaggtactcgtacaatcaaaaggaattgcacgaagtttatcacagagtggggaggggcgaggggaccggtgcggtccgggcccctcaccctgaccctctccccaggggagagggaatatatgattactcttcgtgctcttcccacgccagggcgcgtttcaccgctttcttccagccgctgtagcggaagttacgctcggtggtttcgatgcccgggcggaattcgcgttcgatcaccgctttttcctgcagctcgtccaggttctgccagaagcctaccgccagaccggcaaggtatgccgcgcccagcgccgtgacttcacgcacttcaggacgctcaacgcgggtgcccagaatgtcggactggaactgcatcaggaagttattcgcgaccgcaccgccgtccacgcgcagggcgtgcagacgaatgccggagtccgcctgcatcgcttccagtacgtcgcgcgtctggtaggcgatggattccagggtggcgcgaataatgtggttagagttaacgccacgcgtcaggccaaaaattgcgcctcgtgcatacggatcccagtacggcgcgcccagaccggtgaatgcaggcaccacgtacacgccgttggtgtctttcactttggtcgcgaagtactcggagtcgaacgcatcgctgatcagcttcatctcgtcgcgcagccactggatagacgcaccggccatgaacaccgcaccttccagggcatagttcacttcgccgcgtggtccacaggcgatggtggtcagcaggccgttttctgatttcaccgctttctcgccggtgttcatcagcataaagcagccggtgccgtaggtgttcttcgccatcccttctttgacgcacagctggccgaacagcgccgcctgctggtcaccggcaataccggcgataggaatacgggtgccgcctttaccgccgatgttggtctggccgtaaacctcagaagacttgcgcacgtcaggcagcatcgcacgtgggatatccagcgcgtccagcatcttgtcatcccactccagggtgttgatgttgaacagcatggtacgcgaggcgttggtgtagtcggtgacgtggacgcgtccctgggtcatcttccagataagccaggtgtcgacggtgccgaacagcagctcgccgcgttttgcacgctcgcgtgaaccttccacgtggtcgaggatccacttcactttggtgccggagaaatacgggtcaaccaccagaccggtggcgctgcgcacgtactcttccatgccgtcgcgcttcagctgctcgcagatctcagaggtacggcggcactgccagacgatggcgttgtaaataggcttaccggtttcacgttcccagacaatcgtcgtttcacgctggttagtgataccaatcgcggcaatctcgtcggaactgatatcggcttttgccagcacttcgaccagcgtggagctttgtgacgcccagatctccattgggtcgtgttcgacccagcctggacgaggataaatttgctcaaattcgcgctgtgacacgctgacgatgttcgcgtcatgatccattacgacagcgcgggagctggtagtgccctggtcgagcgcaacgatatattttttttcggtcatggtatgtgtcccgtagtcagattacagcgaagctttttgttgtgcggtagaagtcgtttccttctcctcttccacacaggtgtcgcacggtaaatggcgaccaattaatttgcggtagctgaacgcacccagcgcagccccgacaactggcgcaaacagcggtaccaggaagtaaggaatgtctttgccaccggtaaaggcgacgtcgccccagcctgcgataaaggcgaacgctttaggtccgatatcacgcgccgggttcatcgcgaagccggtcagcgggcccatggaggcaccaatcaccgcaatcagcaggccaatcagcagtggggccagggggccgcgcggaatgccgtttccgtcgtcggtcagcgccaggataacgcccatcagaatagcggtaatcaccatttcaactgcgaacgcctgcacaaaattgatatgcgggtttggataggttgagaagatgcctgccagatccagactttcgacgctgccgcgcaccatatgatgcgtctgttcgaagtcgatgaaaagattgtaataaagcccgtaaactaacgccgctgcgcaaaacgcgccggcaaactgagaaagaatgaaaggaactactttgcgtccgtcgaagcacgcgaacagccacagtgcgatagtcaccgccgggttaagatgtgcaccagacacccctgcagtcaggtagatggccatcgccacgcccagaccccagatgatactgatttcccactgaccaaaactggcacctgccactttcagtgcagcgacacagcccactccgaagaatatcaacaacccggtaccaaggaactcggcaatgcactggccttttaaggttgatgtctgactcataatcggaatcctgaagaaattgatgtttattgttagcatggccgcccgtgacagccacgatgccctgtagacatagtgttaatttatcgttaacgagcaaaaacgagaaatatcgaaatcgaaatgtgtggtctgcgtcaataaaatgagcgttttcgcgccataaagcacatttttgcagcagtacaggatcagtacaggaatgtgagctgaatcatttcattaacgaatcagttaacaatttaggggtatatgaagcgaacgcaccaggaccagacctaaaagtgttgcaaaccgcgatctgcgcggtgtgtcgctggacacagagcgccgcgctccatacaatcgacggtatatgtcgtgcgcgtttatgttaaagcgtcgccttgcaattcaggagaggtagcatcatgtctttagaagtgtttgagaaactggaatcgaaagtacagcaggcgattgacaccatcaccctgctgcagatggaaattgaagagctgaaagagaagaacagcagcctggcgcaggaagtacagaacgcgcagcacagccgcgaagaactggagcgcgaaaacaaccagctgcgcgaacagcagaacggctggcaggatcgcctgcaggcgctgctgggacgtatggaagaagtctgattcccactgggatgaactgaacaggccgggtaaggcgatgccgccacccggcttttttatggttctcgctgactgacacccaaccataaaaaaggccgccaaaggcggccttaacgctacttgtcctgcgctatcatagtaaaagcaacgaacacattcggttcatcactctttacaacgagtacgctggcgacaatgaacgcgatacataaatagcgtttcattatgcggtccctgcagctaaccgctccaccgttcaccaccggtgataagtcggtggacacaagcctgatcaagggttgctttacggttgtgaagacacctttccctggaccgatgcccatgtgcgagatggcggaaagggacgcagcatcatagtaagcaacagcagcgtagttaaggtctgtatagataattaggaatttataaagggtcgaggggattacctgagatttgaatcagggtaagataaaaaccctggtcaaaggttgcaagccttcccaacggaccgcgaatcccgagggacaaaaaaaccgccacattgctgttggcggtttttttatggtccacgcttacggtttttattactcaatatccagcggatcttcggaaaggataatgccggtattatcggcgtagagatggtcgccggagaagaaggtcacgccgccgaagttaacgcgcacgtcgctttcgccgatgccgtcacctgccgcccctaccggtatggccgcgatggcctgaatcccgatatccaggtcttccagatcgtccacctggcgcacggaaccgtacaccactatgccttcccactcgttttgtgcggcaataccggccagttcagcatcaatcaatgcgcggcgtacggaaccaccgccatcgaccaccagtacgcggccacggccgttctgttcgagcagatcgtacaacaacccgttatcctcgaaacatttcaccgtgacgatctgtccgccaaacgacgaccgcccaccaaagttggagaacagcggttcaacgacgttgacatcttcctggtagatgtcacaaagctcggaggtatcgtatttcataggtttaacgctcagttgctgcgaatgtgttcagtatatcgtgcgaaatgcgttgttggcaaaatcatcaattgttaattgatatttgtcagctaactgagcgtctggcttaagacaatcccgatgacgaacaacaggttagtcagcagcgcgccttttaccgtgcgctccagcatcggcggcatggcggccgggctgcgttcacgcatcacaaaacgggcctgcttaatcagcagcggcgcggcaagcacaaacagccagccccacagactgtgcagggaaatcaggttaaacagcgccaggcagaccagggcacccatcagcaggcaggcatggtagcgacgcgcattcaccggccccagacggaccgccagggtgtttttgccgttctcccggtcgctgtcgatatcgcgcaggttgttgatgttgagcaccgcggtcgccagcagaccgcaggcggtcgcaggcaggaacagcgcagggatcaccgtatgcgcctgtaagtaccagcttcccatcacgctcagccagccgaagaacaccagtacggagatatccccgagcccaatgtagccgtaaggacgcgtgccgacggtgtaggtgatggctgcgataatggccaataaacccagcaccaggaagccaataaaatcgctgggggtcttagacgccactgtcaccagcgccagacccgataaacagatcagcaccacggtgataatcagcgcgcgcttcatctgcgcctgggtaatcacccctttttgcatcccacgcagcggcccgatacggtcaggtttgtcgctgcctttcaccgcgtcgccatagtcgttggcgaggttggagagaatttgcagcaggccggcggtaatcaatgccagcgcagcaaccagcggatcgaaataaccctgccaccaggcaagcgccgtaccgacgataatcgcggcaaaggccagagggagtgttttagggcgcagactttcgagccacgcctgagtacggctgatgtcagtcataagtatttagccaataaaaatgggggcattagcccccattaaacgtgatgagaatccagtaaccgcgattataggataaaacggctcagatcttcatctgccactaacgcatccagatgtttactcacatattctgcgtcaatggtaacggtttgaccgttcagatcgctcgcgtcgtaagagatatcttccaccaggcgttccagcacggtatgcagacgacgcgcaccgatgttttcggtggtttcgttcacctgccatgcggcctgggcaatacgtttgataccgtcttcggtgaactcgaggttcacgccttcggtcgccatcagcgctttgtactgaacggttgcagaggcgtttggctcggtcaggatacgttcgaagtcttcggtcgtcagcgcctgcagctcaacgcggataggcagacggccctgcagttccgggatcagatccgacgggctggcaacctggaaggcacctgatgcgataaacaggatgtggtccgttttcaccatgccgtgcttggttgagacggtgcagccttctaccagcggcagcaggtcgcgctgaacgccttcgcgggacacgtccgggccggagctgttgccgccgcgcttacaaattttgtcgatttcgtcgataaacacgataccgtgctgctcaaccgcgtcgatagcgtcctgcttcagctcttccggattcaccagcttcgccgcttcttcttcaatcagcagcttcatcgcgtctttgattttcagcttacgcgttttttgcttctgaccgcccaggttctggaacatggactgcagctggctggtcatctcttccatgcccggaggtgccatgatttccacacccattggcgcggcagcgagatcgatctcaatctctttatcatccagttggccttcacgcagctttttgcggaacgcctgacgcgcagcggacggttccgcctgctgttcagcctgaccccagttgttttttgccggtgggatcagcacgtcgagaatgcgctcttcggccatctcttccgcacggtagcggtttttctcaatcgcctggacgcgcaccattttgatcgccgagtcggtcagatcgcggatgatggagtccacttctttacccacatagcccacttcggtgaacttggtggcttcaactttgatgaacggcgcgttagccagcttcgccagacgacgggcgatttcggttttaccgacgccggtcgggccgatcatcagaatgtttttcggcgtcacttcgtggcgcagctcttcgtcaagctgcatacgacgccagcggttacgcagggcgatagccacggaacgcttggcgttatcctggccgataatgtgtttgttcagttcgctgacaatttcgcgtggggtcatttcagacatgggagatccttacgctttggaggtcaattcttcgatggtgtggttgtggttggtatagatgcagatatcacctgcaatatccaacgccttcaccgcgatatcacgcgcgttcatgtcggtattttccaacagtgcgcgggcagcagcctgggcataagggccgccagagccgatagcaatcaggtcattttccggctgaattacgtcaccgttaccggtgatgataagcgatgcggtttcatcggcgaccgccagcagcgcttcgagcttgcgcagcatgcggtcggtacgccagtctttcgccagctcaacggcggctttcaccagatgaccctggtgcatttccagtttacgttcaaacagttcaaacagcgtgaaggcatctgccgtgccgcctgcaaaaccggcgatcactttgtcgttgtagagacgacgcactttcttcacgttgcctttcatgacggtattacccagcgtggcctggccatcaccggcgattaccacatggccgttacggcgtacacttactattgttgtcacgagcagaccccctggttacagaatcgggaaacagaagccctgagcctgtgcccagggctgaattaaatgatagatgggggggattttgggggtttcaacccccggaggcgagtcgaatgcagtttgtgtgaccggcgattttcaaacgagaaagggtgccatcggcattttctttgcctttgaccggaccaatcaccacgcgattccagccgttattggtggtaatacgcgaatcaaacccttcaaaggccagctgcgcgcgcaccgtttccgcctgctccgcacctttgaacgaaccgcactgtaccatccagcgacgttcgtcttttttctccgccgtctgcttcggcgcttcggtctctttcgtgaccggcgcggcctgctgcgttttcggctgctgcgcagtggtatgcgctggcgtctggagcagatcctgatacggctgagccgcctgcttctgctgctgcgctttaggctgctgctggacaggctgagactgcaccgtacgcgttggctgctgatacggctgttccgttacccgcggctgtgccttcggctgctgtaccggctgggtttgcgcccactgctgttgctgctgaatctgctgttgtgcctggcgacgctgcagcgtttgctgacgctgttccggcgtctgctcattccacggcacttcgttcagctgcgtaggctgctggcgcatatcggcctgcatttgtgccagcagctgacgctgttcatccgtcagctgattcgcattctgcacttcaccacccgcagaaggttcggttggcgcacgtaccccaggctgacggctttccagctctttgatatagcgccagcgctcttcaggcttcggagggaggccatttccggcgactttactggcctgaagcgcctcggactcttcttttttatggtgcgtgataaagtacaggccaccaataaaggcgacgactacagccgcagcaatagcgaccattgctggcgagacagcaggcaggttacgttgcttttttcttgagctactctttttgcgtcgcgaaggtgccggctggccgcgacgtacataatctcgttgtgccactatcgtttcgctgtatttattcgttcgtcagtccgccatgttacttaagcggcggggctttgaccagataagggtatccgaaagacgtttactttaagtcaatgcctgggtcgtgccgcggacgatcagttcgcagtccagcaaccgtgagccgctgctaactgtttgaccgtgaagctgatccagcagaagcagcatcgcttcgcgaccgatttgatagcgcggctgagcgaccgttgagagtggcggatcgcaaaattccgaaagcgaaatattatcgaatccgatgatggataaatctttcggtatgcgaagaccgcggcgtttggcatacgataatgcgcccagcgccatcacgtcgctgtggcaaaatacggcggttggcggctcaggcaggtccagaagtttctccagcgcctgtccacccgcagcgaaggtaaaatcaccgcgtgcaatgtagtgcggatcgacggtgacgccggtccggcgcagcgcctgaacgtaaccctgtaaacggtagtgacacagcggcatctcttccggcccggcgatgcagccaatacgcttatgccccagctcctggagatagtttacggcgttgaacgcggcggtaaggttatcgatatggaccgtcggcagctccagctctggcgcaaactcgttggccatcaccatcggcggtaaattacgctgctcttcgatgctggcatcaaacggcaggcgagagccaagcagcagcatgccgtcgatctgcttggtgatgatgaggtcgatgaaggttttttcctgttggttctgatgggcgcagtcgccaatcagcaccaggtacccctgttccgccgcggtgacttctatgccgcggataatctcgctaaagaaagggtcacagatgtccggcacaatcaccaggatggtgcgcgactcgttgcgtttgacgttacgtcccattgcctgcggaaaatagcccacttcaagcgcagcctgctccacccggttacgggtcgcctgggagactttatccgggttcattaatgcgcgggatactgttgccgtagagacctgtgctttctgggcaacgtctttcatggtcgcagccgcaacctctttcctggacttcaacgtcttctcctcgcctgaacaccgaacttctgccatcaccatttttacagatagttaatggaatcggttacagaattttcataaaaagtgtgaggagcgttaaatttttcgatccgtcttcaaccttcgatgggatcgacgtccagtacccacttcacttttcgcgcttcgggcagggtattaatcagtgccagcgcgccgctgacgatgtgctgaagacgaacgcgcgaggggtgctggagcaaaatttgccagcggaaacggccgccgcgttttggcgccagcgccggcaccgggcccaaaatccacagctgactatccaccagcgggctggcctgcaggaggtttctcagctgctgcaggaaaagtggcgcctgctggttgttatgatcttccgcgcggatgatgacgtggctggtccacggcggtagctgcatggtctggcgttcggccagcgcctgctcggcaaaggcgtcatagcctttgtgcagcagggtttgcagcagcgggtgctccgggtggtgcgtttgcaacaccacttcgccctgtttaccggcgcgtcctgcacgccctgcaacctgggtgtaaagctgggcgaagcgctcggctgaacgaaaatctgccgagaacagcgcgccgtccacgtccagcagggcaaccagcgtcacgtccgggaagtggtggcctttggccagcatctgggtgccaatcaggatgcgcgcgccaccgcgatgcacttccgccagctgctgttcgagtgcgcctttgcggctggtggtgtcccggtcgatacgcgaaatcggcacgtccgggaaaaagggcccaagcgcctgctccagctgttccgtccccagaccgaccggcacaatatgcgttgagccacacgacgggcactggcgcggcacaggacgctggctgtcgcagtggtggcagcgcagatgacgctgggcctgatggaaggtgtagtaatgatcgcagcgcgggcattcggcaatccagccgcagtcgtggcacagcagggcaggtgcaaatccgcgacggttgaggaacagaatgacctgattccccgcctgcaaatgctggcgcatgcgggtaataagcgcgggcgctagccccgcctggacctgctgacctttcaaatccagcacgtgctgaatggccggacgggcattccccgcgcgacgcgtcaggcgcagcatgtggtatttacgctggcgcacgttgtgcagcgtttcgagcgcaggcgtggcggatcccagaacaataggaatttgctcgctgtgcgcgcggtagacggccagatcgcgggcgtgatagcgccagccttcctgctgtttataggagctgtcgtgctcttcgtcgatcacgataacgccaagatttttaaacggcgtgaacagcgacgagcgggtgccgattacaatcgccgcttcgccgtttttcgctttcagccaggcgctgagtcgctcgctgtcattcaggccggagtgcagaacctcaaccggcgcgttaaagcgttcgcggaatcgggcgatggtttgcggcgtcaggccaatttccggcaccatcaccagcgcctgtttcccctgcgcgagcacgttttccagcacgctcaggtaaacttcggtcttgccggaaccggtgaccccagccagcagccaggcagagaaacgatcggaggcgctatgaattgcgcctaccgcggtggcctgctcggtattcagacgcaggcgatcccctgaaacggagaaactctcccgccagtcgttaagggcaggcgtctcgcttgccaggtcgctcagccctttttttcttaatgcctgtagcgccgtttcgctgacctcaagctcgtcgacctgatgccgccagattttcccctgacgcagcgccgccagcgcctgctgctgtttctgcgagcgcttcaggctgttgatgtcgacggcctggccttcctccgtggcaaaccagtaccacatcggcgcatggctggcgctcttgccctgacgcagcatcattggcagggcgtggaacaggacgtcgccgatggggtgatgataataatccgccgcccacagcagcagtcgccaggtgctggtggagtagacgggctcgctgtccagcacctcaacgaccgatttcagttcgttaagcggcagttcgctcttatcgctgacggagacgacgatccccacgcgctgctgtttgccaaacggcacggtcacgcgacagcccgctttggcgctcatgctgtcgggcagcagatagtcaaaggtgcggggaagcggaacgggcagggcaacgtgagcgacgggcatcgaatcttcctgacttgaaaagtggcgcgttagtatacacattagtaaaagcggcgtgcggatcagtttgcatacgttggtcaaattctgtatgattcgccgcctttggtgtactttacgccaaagaacttacaatcaacatcgcgtggtgtctggcgttagggctggaagagcgacgcggccttaactgaggttctcccatgaaaaaagatattcacccgaaatacgaaatgattactgcaaactgttcttgcggtaactctatccagatccgctctaccgtgggtcacgatctgaacctggacgtgtgcggcaaatgccacccgttctacactggtaagcagcgtgatgttgcaaccggtggccgtgttgaccgcttcaacaagcgtttcagcatcccgggcgctaaataagtttcccgaaaaaaaggcaccgcaaggtgccttttttgtatccgcttctcagtattcccacgtctccgggtcaatacccagttcacgcatgatcaccttcgcctcttccgggatttcgtcactacgctctttgcgcagatcgtcatcgttcggcaacggttgaccggtaaacgcatgcagaaacgcttcgcacagcagttcgctgttggttgcgtggcgcaggttgttcacctgacgacgcgtacgttcatcggtgaggatcttcaacaccttcagaggaatggaaaccgtaattttctttacttgctcactcttcttaccgtgctcagcgtatgggctgatatattcgccgctccattcagccatgagatacctttaatcctctcagtcatttatctaaaggtgcaaaaccggtaaccacccgttttgaaccgcaatcttgcctagtttaccgtagagacgataccgtggcacggatattgccgctgcagcgtgcactaaagcatataattttaacggctatttgcgcattgctcaatctatacgcaaagaagtttagatgtccagatgtattgacgtccatactttcaatgtttactctggtgcctgacttttcacctcattcgccaggaagccctcaccatgacgcgtaaacaggccactatcgcagtgcgtagcggattaaatgatgacgagcagtacggctgcgttgtcccgcccattcatctttccagtacctacaatttcaccggatttaatgaaccccgtgcgcatgattactcgcgtcgtggcaaccctacgcgtgacgtgacccagcgcgcgctggccgaactggaaggtggcgcaggggcagtattaaccaataccggcatgtctgccattcatctggtgaccacggtgttcctgaagcctggcgacctgctggttgcgccgcacgactgttacggcggcagctatcgtctgtttgacagcctggcaaagcgcggctgctatcgcgtgctgtttgtcgatcaaaacgacgaacaggcgctgaaacaggcgctggcagagaaaccgaagctggttctggtggaaagtccaagcaatccattgttgcgcgttgtcgatattgcgaaaatttgtcagctcgcaagggatgcgggagcgataagtgtagtggataatacgttcctcagtccggcccttcagaacccactcgcactgggtgccgatctggtgttgcattcatgcactaaatatctgaacggccattctgacgtggtagcaggcgtggtgattgccaaagatcctgacgttgtcaccgaactggcatggtgggccaataatattggcgtcaccgcaggcgccttcgacagctacctgctgttgcgcggcatccgtacgctgtcgccgcgcatggacgtggcgcagcgtaatgctcaggcgattgtcgacttcctgaaaacccagccgctggtgaagaagctgtaccacccgtcgctgccggaaaaccaggggcacgagattgccgcgcgccagcagaaagggtttggcgcgatgttaagttttgaactggacggtgacgagcaaacgctgcgtcgcttcctgagcgggctgtcattgtttacgctggcggaatccttaggtggggttgaaagcttgatctcccacgccgcgaccatgacgcacgcaggaatggcacccgaagcacgtgccgccgccgggatttctgagacgctgctgcggatctcaaccggtatcgaagattctgaagatttaattgccgatctggaaaatggcttccgggtcgcagccaaggggtaatcatgagtgtgatagcgcaggcaggggcgaagggtcgtcagctgcacaagtttggtggtagtagtcttgctgatgtgaaatgttacctgcgcgtcgcagggatcatgacggaatattcacagccgggtgacatgatggttgtctcggcggcgggcagcaccaccaaccagttgattagctggctgaaactgagccagaccgatcgcctttctgcgcatcaggtgcaacagtcattacgtcgctatcagagcgaattgattgccggcctgctgcctgcggacgtggcggacggactgatcggcgccttcacgcacgatcttgagcgtctggctgccctgctggacaacggcattaccgatgcggtgtatgccgaagtggtgggccacggtgaagtatggtccgcgcgcctgatggctgcggttctgcaacacctgggcgtggacgccgcctggctcgacgcgcgtgatttcctgcgtgccgaacgcgccgcgcagccgcaggtggatgaagggttatcctacccgctgctgcaacagctgctggtgcagcacccgggcaaacgcattgtggttaccggctttatcagccgcagcaacgcgggtgaaaccgtgctgctgggccgtaacggctccgactactcggcgacgcaaatcggtgctctggcgggcgtgtcccgcgtcaccatctggagcgacgtggccggtgtttatagcgcggacccgcgcaaagtaaaagatgcctgcctgctgccgctgctgcgcctggatgaagccagcgagctggcgcgtctggcggcaccggtgctgcacgcccgtacgctgcagccggtttccggtagcgatattgacctgcagctgcgctgcagctacaccccggatcaaggctccacgcgcattgagcgcgtgctggcctctggtaccggggcgcgtattgttacgagccacgacgacatctgcctgattgagttccaggttcctgcgggccaggacttcaagctggcacataaagagatcgacacgatcctgaaacgcgcccaggtgcgtccgctggccgtgggtgtgcataatgaccgccagctgctgcagttctgctataccgcagaagtggcggacagcgcgctgaaaattctggatgaagcgggcctgccgggcgagcttcgcctgcgtcaggggctggcgctggtggcgatggtgggcgcgggcgtcacccgtaacccgctgcactgccaccgcttctggcagcagctgaaaggccagccggtggagttcacctggcagtcggaagagggcatcagcctggttgccgttctgcgcaaagggccaaccgaaagcctgattcagggtctgcatacctctctgtttcgcgcggaaaaacgcatcggcctggtgctgtttggtaaaggcaacatcggttcccgctggctggagctgttcgcccgcgaacaggtcacgctctcggcgcgtaccgggtttgaatttattctcgcaggcgtggtggacagtcgccgcagcctgctgaactacgaagggctggatgccagccgcgcgcttgccttctttaatgatgaagccgtcgagcaggatgaagagtcgctgttcctgtggatgcgcgcgcacccgtacgacgatctggtggtgctggacgtgaccgccagcgaacagcttgccgatcagtatcttgatttcgccagccacggtttccacgttatcagcgccaataagctggcgggggcaagcagcaccgataaataccgccagatccacgacgcgtttgaaaaaaccggccgtcactggctgtataacgccaccgtgggcgcgggcctgccggtaaaccacaccgtgcgcgacctgattgaaagcggtgacagcattctggcgctgagcggtatcttctccggtacgctctcctggctgttcctgcagtttgacggcaccgtgccgttcactgacctggtggatcaggcgtggcagcagggcttaacggaacccgatccgcgcgttgacctctccggtaaagacgtgatgcgtaagctggtgatcctggcgcgcgaagccggttatgacatcgagccggattccgtccgcgtcgagtcgctggtgcctgccggctgtgaagagggttctgtggatcatttctttgaaaatggtgaagagcttaacgagcagatggtgcagcgtctggaagcggcgaacgagatgggtctggtgctgcgctacgtggcacgtttcgaggccaacggaaaagcgcgcgtcggtgtcgaggcggtgcgtcctgaacatccgctggcggcgctgctgccgtgcgataacgtcttcgccatcgaaagccgctggtaccgcgataacccgctggtgatccgcggcccgggcgccgggcgcgacgtcaccgcaggggcgatccagtccgacatcaaccgtctggctaagctgctgtaaaaactcaatttccctctccctgtgggagaggattagggtgagtgcagtctgatgcactcacccccatcatgaatttccctcacattccctgagcaaacctcaccgttattgttgattatttctattgacgtccctccgcttttccgtcatttttacatctggacgtctaaacgtatagaagttcacaacacaacagacaatgacacgcgattgataggggtagggtatgagcttttttcacgccaaccagcgggaagcactgaaccagagcctggccgaagtaaacggccagattaacgtctcttttgaatttttcccgccgcgcaccagtgaaatggagcaaaccctgtggagctctatcgatcgtctcagcagcctgaaaccaaagtttgtctccgtgacctacggtgcgaactctggcgagcgtgaccgtacgcacagcatcattaaaggcatcaaagatcgtaccggtctggaagcggcgccgcacctcacctgtatcgacgctacccgcgacgagctgcgtgccatcgcccaggattactggaataacggcatccgtcatattgtcgcgctgcgcggcgacctcccgcccggcagcggcaagccagagatgtatgcggccgacctggttgggctgctgaaagaggtggcagatttcgatatctccgtggctgcttaccctgaggttcacccggaagcgaaaagcgcccaggcggatctgcttaacctcaagcgtaaagtggaggccggtgccaaccgcgccattacccagttcttctttgatgtcgaaagctacctgcgcttccgtgaccgctgcgtctccgcgggcatcgacgttgaaattatcccgggcattctgccggtctctaacttcaaacaggcgaagaaattcgccgatatgaccaacgtgcgcattccgctgtggatgtccaaaatgtacgaaggtctggatgatgacccggaaacccgcaagctggtgggggccaatatcgccatggacatggtgaaaatcttaagccgtgaaggggtgaaagacttccacttctacacgctaaaccgcgcggagatgagctatgccatctgccatactctgggcgttcgccccgcgtaaaacaccaaaagccctcttaaatagagggctttttaacagggtaaaaagttaaaaggtatcagctatcgaatctgtggattaattcaactataacttattgctagtggtgtatatcgtaacggtaacactgtaaaagggagcatagcgatgagcacgtcagacgagaccaataaagcggcatcagtcggcaaatgcccgttccatcagggcggcgtcgatcacagcgcgggcgcaggtacaggcagccgcgactggtggccaaaacaactccgcatcgatcttcttaaccaacattccaatcgttcgaacccgctgggtgaagacttcgactaccgcaaagaattcagcaagcttgattactctgcccttaaaggcgacctcaaagcacttttaaccgactctcaaccgtggtggcctgccgactggggcagctatgcgggcctgtttatccgtatggcgtggcacggtgcgggtacctatcgctccgtggacgggcgcggtggggcaggacgcggtcaacagcgctttgcgccactgaactcctggccggataacgtaagcctcgataaagcgcgccgtctgctgtggcctatcaagaaaaaatacggacaaaaaatctcctgggccgacctgtttatcctcgcgggtaacgtggcgctggagaactccggcttccgtacctttggttttggtgccgggcgtgaagacgtctgggaaccggatctggacgtgaactggggtgatgaaaaagcctggctgacccaccgtgacccggaagcgctggctaagcgtcctctggcagccaccgaaatgggcctgatctacgttaacccggaagggccgaacgccagcggtgaaccgctatcagcggcggcagcgattcgcgcaaccttcggcaacatgggcatgaacgatgaagagaccgtcgcgctgattgcaggcggccacaccctcggcaagactcacggcgcgggtgaagccacccacgtgggtaccgaccccgaagcctcaccgattgaagcacagggcctgggctgggccagcacgcacggcacgggggttggcgctgatgccattacctccggtctggaggtcatctggtcacaaaccccgacccagtggagcaactacttcttcgagaacctgttcaaatacgaatgggtacagacccgcagtccggcaggggcgattcagtttgaagccgtggatgcgccggaaatcatgcccgatccgttcgacccgtcgaaaaaacgcaagcctaccatgctggtcaccgacctgacgctgcgcttcgacccggaattcgaaaagatttcccgccgcttcctgaacgatccgcaggccttcaacgaagccttcgcgcgtgcctggttcaagctgacccaccgtgatatggggccaaaatcgcgttaccttggcccggaagtgccgaaagaagatctgatctggcaggacccgctgccgcaggcggtgttcaatccgacgaaagaagacattgaaagcctgaaggcggaaattgctgcctctggtctctccgtgagcgaactggtttccgttgcctgggcgtcagcctcgaccttccgcggtggcgataagcgtggcggtgccaacggcgcgcgtctggcgctggcgcctcagcgtgactgggacgtgaacgctgcggcggttcgcgcgctgccagccctggaagctatccagcgcaccaccaacaaagcctccctggccgatatcatcgtgctggcgggcgtggtaggcgttgagcaggccgcaaaagcggcaggtgtgtatgtcaccgttccgttcaccccgggccgcgtagatgcgcgtcaggatcagacggatattgagatgtttaacctgctcgaaccgattgccgatggtttccgcaactaccgtgcgcaggtggatgtgtccaccacggagtctctgctgattgataaagcccaacagctgacgctgactgcgccagaactgacggtgctgattggcggcctgcgcgtactgggtgccaactttgatggcagtaaaaacggcgtgttcaccaaccgcgaaggcgtgctgagcactgatttcttcgtgaatctgctggatatgaacacgcagtggaaggcgaccgatgagtccaatgagctgtttgccggaagcgatcgcaccagcggtgaagtgaaatataccgccacccgcgccgatctggtcttcggctctaacgccgtcctgcgcgcgctggccgaggtttacgccagcgatgatgggcatgagaagtttgtccgcgacttcgttgccgcctgggcgaaggtcatggatctggatcggtttgacgtgaagtagccagtgtgccgggtggcggctacgccttacccggcctacaaattaaagtgccatgtaggccgggtaagcgcagcgccacccggcttttttattactcccactcctgcaggaatcgctgtccatactggtctgccaccagcagcgccgcatacacctgatccggcgtgacgccccccggcatgttgtggatcgtttctccttccgcacatgaggcttcggcaatcagacgcattttggctggaatatcctctttgatgttcagctgtgccagggtgatcggcagccctacgctgtggcaaagcgccgcgacggtctcaatttcttctaccgacgcgttttccagcaccagctgcgtcagcgtaccaaacgccactttctccccatgatagaagtgatgcgcgtccggcaccgccgtcatgccgttatgaatagcgtgtgccgccgccagcccgccactttcaaagccgacgccgctgagataggtgttggcttcgataatgcgttccagagcaggcgtcaccacatgctgttccgccgccagcatcgctttttcaccctcttcaaccagcgtgttgtagcacagctcggcgagcgctaatgccgcctgtgtgcatttacccccggccatagtggtcgcgccgctgcgcgagcaggcgcgtgcttcaaaccaggtcgccagcgcgtcgccaatcccggcggccagcagacgtgcaggcgcacctgctactactttcgtatccacgatgaccatgttcgggttgtgtggcagcatcaggtagcgatcgaactcgccgctgtcggtgtaaataacggaaagggcgctgcacggtgcgtcggtggaagcgatagtcggcgcaatggcgaccggcacgtccataaagtgggccagcgctttcgcagtatccagcgttttaccgccaccaatacccagtactgccaggcagtcggcgctgtcggccagctttttcagacgatcgatttcattttgcgaacattcgccgccaaacggcgcgatttcggcatgcagttcggcttttttaaaactctggcgcagggtctcttcagcaaaacccagcacaaacttatcgccgacgaccagccagcggtttgccaggggtttcagatagtcgccgagacgggtcagcacatccgcgccctggatatatttccctggcgattgaatgatacggtccataacagttctcccttagaggttgaggttaccaaacgcgtttttccagtcctgctcgaacttctctatggctgactctaccgccggcgtaccgagcatgtgttgcgctacgtctaagggaagcgtgattgcttcacatcctgccaacaggcagtcgagcgcctgacgcggcgttttgaagctggcggccagtactttactgcccggcgcgtgcagctccagcagggactgcagttcctgaaccatgcgaatgccgtcaccgccctgcgcgtcgacgcggttgacgtacggcgcgacatatttcgcccctgcgagtgcggcgagcaggccctgcgccgcgctgtaaacggcggtgcccagcgtggttatcccctcttttttcaaggccttaattgcgataagtccctgagccgtcaccgggattttcaccacaatgcccggaatggcgttactcagacgtttggcttctgccaccatgccttcggcatcgcggctcatggtttgagcaaacagcgtgccttccggcccgatggcttgttgcaggcgcggcagcacgtcccagatggattcacggctggcggcaatgatgctcgggttggtggtgacgcccgcgatgggaaagatgcgcgccaggcgttcaacttccgccacgttggcggtatccaggtacagttccattatttttccttaagtcagaaaggttgaataaaggatacggcgcacccaggcgcggcgaatacaggtcaattttgccaaatactggacaaatgtaatgtccttggcgaagtgagagagcgatcacaatgctactttttggcgatcagctggctatggtactggcgtcgatattcggaaggggaacgttcggtgtgcttgcgaaagagacggcaaaagtagttgctgtccgtaaatccacagcgtgtagcgatatctttaattttgagatcgtagcctttcagcagctgacgcgcatgttccaggcgcgtttttgttaaatattcattgaatccgacgctgccgactttctggaatagatgggaaaggtagtttggtgagatgtagaacgcctgtgccacggattcgcgagttaacaaagaggcataattttcttcgatatagctccgaacggcttcgaacagtgcccggctgcggctgtcggtgtgaatttcgcttccaagcagatcccggcagtggctgagcaggcttaaaaccaccagccttgctgtgtcctgctcttctggctgcatctgtaattcggtgagcgtttgcagaagaaaagcccccgttcgcggaccacgtcgggcaacctggagttgttgtaagagcacattgtcatgctgtaactcgattgtaagctgctgcttaccgaaatgtatgctcagggcgtgaggcgcaggatgcgtaatttgtccaaaaaaagaaaaaatcgcctcgcagggtgtgtcaagggtaatgccgaggcagggagaggttcggggatgctgttcagccagcgctgagaaatgaatctgacccagcggtaacgtgcggttcaccaggtctgtcaaaatctgggtgatatcggaatgcataaggaggctaccgaaatttgccgggtggcgctaacgcttacccggcctacttatcgtaggcccgtgcaagcgcagcgccgccgggcgtaaagcattagccggtgttacgcatacccgccgcaacgcccgcaatcgtcaccatcagcgcctgttcaacgcgtggatccggctctttcccttcttcttctgccagacgcgaacggtgcagcagctctgcctgcaggacgttcagcgggtcggtgtagatgttacgcagctggatagactcggcaatccacggcaggtccgccatcaggtgtgagtcgttagcgatgtccagcaccactttgatgtcgccttccagcagttcgcgcagctctttgcccagcgcccacagctcgggcttcaccaggcgctgatcgtagtattccgccagccacaggtcggccttcgagaagaccatctccagcattcccagacgggtagagaagaacggccagtcgcggcacatggtctccagctcgctctgtttaccgtcttccaccactttttgcagtgcggcaccggcacccagccaggcgggcagcattaagcggttctgcgtccaggcgaagatccacggaatggcgcgcagagattctacgccaccggtcggacgacgcttggcaggacgcgagcccagcggcagtttacccagctcctgctcaggcgtggctgaacggaagtaagggacgaaatctttgttttcacgcacatagccgcggtacagatcgcaggagatgtctgacagctcgtccatgatgcggcaccaggattcttttggctccggcggtggcagcaggttggcttcgaggatcgcgctggtataaagcgacaggctgctgatggtcacttccggcaggccgtacttgaagcggatcatctcgccttgctcggtcacgcgcaggccgcctttcaggcttcccggcggctgtgacagcagcgccgcgtgtgctggcgcgccgccacggccaattgagccaccgcgtccgtggaacagggtcagctcgataccggctttctcgcaggttttgatcagtgcgtcctgcgcctgatactgcgcccaggatgccgccattacgcccgcgtctttcgcggagtcggaatagccaatcatcaccatctgcttgccctgaataaagccgcggtaccagtcgatattcagcaactgagtcatgacgtcgttggcgttattcaggtcgtcgagggtctcaaacagtggggcgaccggcagggcgtagtcgatacccgcttctttcagcagaaggtgtacgcccagcacgtcggacggggttttcgccatggaaatcacataggcggcgaccgatcctttcggtgcgtccacgatcgctttacaggtgttgagcacttcgcgggtatcgttgcttggctcccagttgcgcggcagcagagggcgcttggagttcagctcgcggatcaggaacgcctgtttgtcggcttcggaccagctttcatagtcgccgatgccgaggtagcgggtcagctcgcccagcgcttcggtatgacgggtactttcctgacgaacgtcgatacgtaccagcggcacgccgaaacacttcacgcgacgcagggtgtcgagcagttcgccgttggcaatgatgcccatcccgcaggcctgcagcgatttataacaggcgtacagcggctcccaaagctgttcattctggctgagcaggccttctggttttggcagacgctggcctttcaggcgcgcttccagccaggcctgagtggccatcagctgaccacgcagttttttcatcaggaaacggtacggctcgctggcgccttcttcaccggccagcgcgcgtagttccggcgtcgcttctaccatcgacagctcggagatcagtacctgaatgtctttcaggaacagatcggtcgctttccagcggctcagcagcaggacgtgacgggtgatttctgcggtgacgttcgggttgccgtcgcggtcgccgcccatccaggaggtaaagcgcaccggcacaaagtcgaccggcagacggtagtccaggttcgcttccagctgttcgttcagctcgcgcaggtagttcggtaccccttcccacaggctgttttccaccaccgcaaagccccatttagcttcgtcgaccggacttgggcgatgcttacgaatttcatcggtgtgccaggactgagcaatcagctggcgcaggcggcgcatcagctggttgcgttcatagtcggcaatgtctttgttatccagctgcttcaggcagttgttcacttccaccattttgtggatcagggtgcgacgggtgatctcggttgggtgagcggtcagtaccagctccagcgaaagtgactccaccgcttttttgatggtggcttcgttgaggtctggctggtctttcagtttacgaagggtgcgggcaatgacttccgggttgctggccgcttcgccgtttggcgaaatgctgtggtattgctcagcggtgttggccaggttcaggaactggctgaatgcgcgtgcaacgggcagcagctcgtcgttcgagaggttctgcaaggtggtgagcagctcctgacgactggcctcgttaccggcacgggaagatttagacagcttgcggatggtttcaacgcggtcgaggatgttctcccccaacgcatctttgatggtatctccaagcactttgccgagcatactgacattactacgcaacgcggaatattgttcgttcataaaaacccagtcaccccatcatttttgtttatgcccaggcgaaaatcttctggacattattttgtcatctccctttataaagccacgtaaaacccccgtcgtcaattgctgcgaaaacggttcagcaaacgaataaatgtgggcaatttacgaaatttaattcgcattgcgtcagataagagatgcttatggaaatgtgacggagatcgcgggattttcccctctcttccgaaaggggaaaggtcattaatgccagcagaagtgatgcacgacctgggtaatcagttcgcgggtgggcttgataaagcgggtttcaagatattcatccggctggtgcgcctggttgatggagccagggccaagaaccagcgtcgggcacagcgtctgaataaacggcgcttcggtgcagtaattcaccacgtcagttttttcaccgagcagcttttccaccacttcgaccagctgatggtccggcgggcattcataacccgggatcggcgggtgcagttccgagaccgtcaggcggcccggccagcgctcactcaccggggccagcgcttcgttcagtaaaccatccagatcgctcagggtcatgcccggcagcggtcggatgtccatgtgcagctcgcagcaggcgcagatacggttcgaggcatcaccgccgtgcaggctgccgagattgagcgttggatacggcacggtgaacgcctcatagtggtaacgctctttcagatcgtcgcgcagggtcatgatgcggccgatggcgtcatgcatcagctcaatggcgttgacgccgcgcgccggatcgctggagtggccggactggccgagcacgcgcacggcggtagagatatggcctttatgcgcgcgaatcggttgcagagacgtcggctcgccgatgatcgcgcaatccggacgaatcgacgtgttttctgagaagtagcgcgcgcccgccatactggtttcttcatcagcggtcgccagaatgtagagcggttttttcagcttcgtcacgtccacgtcacgcagcgcgtcgaggataaaggcgaagaagcctttcatgtctgcggtgcccagaccgtagagcttgttgtcgtgctcggtcagggtgaacggatcgcgcgtccagcggccatcgtcaaacggcacggtgtcggtgtgaccggccagcagcaggccgcccgcaccggttccggtactggcgagcaggttaaatttgtgacgagtgccggggacgggctgaacctcaacgttaaacccaagatcgctaaaccaacccgccagcagattgattaaagactcattgctctgatccagtgcttcttccgttgcgctgatggacggtgtggcaatcagggcgcggtagatctcgataaatggcggtaagttcattttcattgttgacacaccttaggtcgtgatagtatcaatattcatgcaataaatgtgaataaaaatacattaacgttgagcataaaggaacccgatgttgaatacgctgattgtaggcgctagcggttatgcgggcgcagagcttgtaagctacgtgaatcgccatccacatatgaccataaccgctttgaccgtgtcagcgcaaagcaatgatgcaggaaagttaatttccgatttgcatccgcagcttaaggggctggtcgatctgcctttgcagcccatgtctgacatcagcgagtttaccgacggcgttgacgtggtgtttttagccaccgcacacgaggtcagccacgacctggcgccgcagttcctggcggccggctgcgtggtcttcgacctctccggcgcgttccgcgttaacgacggcgcgttctacgaaaaatattacggtttcacccatcagcatccggatctgcttgaaaaagcggtgtacggcctggcggagtggagcgcagataaactgaaagaagcggacctgattgccgttccgggctgctacccgacggcggcacagctttcgctgaaaccgctgatcgacgccgggctgctggatctgaaccagtggccggtgatcaacgccaccagcggcgtgagcggagcagggcgcaaggccgccatctccaacagcttctgcgaagtgagccttcagccgtatggcgtgtttaatcatcgccatcatcctgaaatcacgacgcatctgggcgcggacgtgattttcacgccgcatctgggcagcttcccgcgtgggatcctcgaaaccattacctgccgcctgaagcctggcgtgaccaaagagcaggtgaatgaggtcttcacgcaggcgtatgcggacaaaccgctggtgcgtctgtacgacaaaggcgtgccggcgctgaaaaatgtggtcggcctgccgttctgcgacatcggctttgccgtgcagggtgagcatctcatcgtggtggccgcagaagataacttactgaaaggcgctgccgctcaggcaatgcagtgtgcaaatattcgtttcggtttcccggaaacgcaggctcttatttaaggtgtgatgatgaacccattaattatcaaactcggtggtgtactgctggacagcgaagaagcgctggagcgtctgtttaccgcgctggtgaactatcgcgaatcacaccaacgtccgctggtgattgtgcacggcggcggctgcgtggtggatgagctgatgaaagggctcaacctgccggtgatcaagaaaaacggcctgcgcgtgacgcctgcggaccagattgacattatcaccggtgcgctggcgggtacggcgaacaaaaccctgctgtcctgggcgaagaaacaccgcattgcttccgttggcctctacctgggggatggcgacagcgtaaaagtgacccagctcgacgaagcgctcggtcacgttggactggcgcagccgggttcgcctaagctgattaacacgttgctggaaggcggtttcctgccggtggtgagctctatcggcgtgaccgaagagggcgagctgatgaacgttaacgctgaccaggcggcaactgcactggcggcaacgctgggtgcggacctgatcctgctctccgacgtgagcggcattctggacggaaaaggccagcgcattgcggaaatgactgcggcaaaagccgagcagctgattgcgcagggcatcatcaccgacggcatgatcgtcaaagtgaacgccgcgctggatgcggcgcgcacgctgggccgcccggttgatatcgcctcctggcgtcacgcggagcaattgccggcgctgtttaacggcacgccgattggcacgcgtattttagcgtaagtttttaatgaatgaccgtaggccgggtaagcgtatcgccacccggcggaactaacgaataaaggaacgatgttatggcactttggggtgggcgttttacacaggcagcggatcagcggttcaaacagttcaacgactctttgcgcttcgactaccgcctggccgaacaggatattgtcggctctgtggcctggtccaaagcgctggtgaccgttggcgtactgaccgcagacgaacagcagcagctggaagaggcgctgaacaacctgctggaagaagtgcgtctggatccgcagcaaattctgcagagcgatgctgaagatattcacagctgggtggaaggcaaactgatcgacaaggtcggccagttgggtaaaaagctgcacaccggccgtagccgtaacgaccaggtcgccaccgacctgaagctgtggtgtaaagataccgtcgcggagctgctggcggctaaccgtcagctgcagaccgcgctggtggagaccgcacagaacaatcaggacgcggtgatgccgggttatacccacctgcagcgcgcgcagccggtgacctttgcgcactggtgtctggcctacgttgagatgctggcgcgtgacgaaagccgtctgcaggataccctgaagcgtctggacgtcagcccgctgggcagcggcgcgctggcgggtaccgcttacgaaatcgaccgcgagcagctggcaggctggctgggctttgcctccgccacccgcaacagcctggacagcgtctctgaccgcgaccacgtgctggagctgctctccaatgcgtctatcggcatggtgcacctgtcgcgctttgctgaagatctgatcttctttaactccggcgaagcgggcttcgttgagctgtccgaccgcgtgacgtcaggctcatccctgatgccgcagaagaaaaacccggacgcgctggagctgatccgcgggaaatgtggccgcgtgcagggcgcgctgaccggcatgatgatgaccctgaaagggctgccgctggcgtacaacaaagatatgcaggaagacaaagaggggctgttcgacgcgctcgacacctggctcgactgtctgcatatgggcgcgctggtgctggacggcattcaggtgaagcgtctgcgctgtcaggaagcggcgcagcagggctatgcgaacgcgaccgagctggcggattacctggtggcgaagggcgtaccgttccgtgaagcgcaccatattgtcggtgaagcggtagtggaagccattcgtcagggtaaaccgctggaagatctggcgctggccgatctacagaaattcagcgcggttatcggggatgatgtgtatccgattctggcgctgcagtcctgcctggataagcgtgcggcgaaaggcggcgtgtcgcctaagcaggtggcgcaggcaattgcggaggcgaaaaaccgcctgatttgatgcctgaaacgtcgggtggcggcttcgccttacccgacctacaaaaccccagcccaaccctgagttgggcttttttacgcaaaaaaaaagcggaccacggggtccgcaaaagttcacgttggctttagttgttcgagttttgagagaaactcgctgacggtggcggggacgtcaagggtcaaacacgtgccgcctcgtctatgtggtgtattattcaacagaatgcttgatagggataatcgttcgttgctatgctatctatcgccatgaactatcgtggcgacggaggatgaataatgaatattcgtgatcttgaatacctggtagcgttagccgagcatcgtcactttcgccgcgcggcagattcctgccacgtcagccagcccacgctgagcggccagatccgcaagcttgaagacgagctgggcgtgatgctgctggagcgcaccagtcgtaaggttctgttcacacaggcaggtcttctgctggtggatcaggcgcgcaccgtgctgcgcgaggtcaaagtgctcaaggaaatggcaagccagcagggggaggcgatgtccggcccgctgcatattggcctgatcccaaccgttggcccgtacctgttaccgcacatcattccgatgctgcaccagacgttcccgaaactcgaaatgtacctgcatgaagcgcagacgcatcaactgctggcgcagctggacagcggcaagctcgactgcgccattctggcactggtaaaagagagtgaagcctttattgaagtgccgctgttcgatgagccgatgatgctggcgatctatgaagatcacccgtgggcgaaccgcgatcgcgtgccgatggccgatctggcgggtgaaaagctgctgatgctggaagatggccactgcctgcgcgaccaggcgatgggcttctgtttcgaagcgggtgctgatgaagatacccacttccgcgcaaccagcctggaaaccctgcgaaatatggtcgcggcgggaagcggtattacgctgctgcctgcgctggcggtgccgcacgagcgtaagcgtgatggcgtggtctacttgccgtgcattaagccagagccgcgtcgtacaattggcctggtttatcgcccgggttcaccgctgcgcagccgctatgagcagctggcagaggccatccgcggtgcgatggatggccattttgacaacgcgttaaaacaggcggtttaagccgttcagcgcggctacccgataggcttccgccatggtcgggtagttaaaggtggtgttgacgaagtactcaatggtgttaccaccacctttctgctccatgatcgcctggccgatatgaatgatttccgcggcgcgttcaccaaagcagtgaatcccaaggatctctttcgtctcgcgatggaacagaattttcagcgtacccacgctcatccccacgatttgcgcccgcgccagatgtttaaactgcgcacgacccacctcgtaaggcaccttcattgacgtcagctgctgctcggttttgccgactgagctgatttccgggatggtgtagatacccgtcgggatatcttcgatcagatgcgccgtcgcttcgcccttcaccagcgcctgggccgcaatgcgtccctggtcgtaagcggcggaggccaggcttgggtagccaatcacgtcgccgaccgcgtaaacgtgcggcagggcggtctgatacatgctgttgaccttcagctgaccgcggctgtcggtttcaagcccgatattttccagctgcagggaatcggtgttgccggtacggccgttggcgtacaggaggcagtccgctttcagcttcttgcctgacttgaggtgcatgatcaccccgtcgtcgcagccttcgatcttctcgtactcttcgttgtggcgaatcaccacgccgctgttccagaagtggtaggagagggagtccgacatctcctgatcgaggaaggccagcaggcggtcgcgagtattgatcaggtcaactttgacgtccattccgcggaagatcgacgcatattcgcaaccaatgacccctgcgccatagataatgacgtggcggggttcatggtgcaggctcagaatcgagtcgctgtcgtagacgcgcgggtgcgagaagtccacgtcggccggatggtacgggcgtgaaccgcaggcaatcacaaatttttcagcggtgatggtttcaaccgacccgtcgtggcattcgagtgccagggtgtgttcatccacaaaatgcgcgttgccctgcaaaatttcacagtggttacgctcataaaacccctgacgcatgcgcgtctgctggttaatgacggtatccgcgtgattcaggatgtcggcaaaggaggaacgaagaagtcgggagtggtcgctgtaaagaggattctggttaaattcgataatgcggctaacggcgtggcggagggctttcgaagggatggtgccccagtgggtgcaaccgccgccgacattatggtagcgctcaatgaccgctactctggctccctgtttcaccagacccatagcagcgccttcgccgccggggccggaaccaataactattgcgtcgtaatcgtaggaatgtggcatggtaaggcttacctgttcttatacataaaagcaacagaatcataacatcattgccagagtaacccaattatcgttgtgcttttttccggcagtggagcacaaaccgcacgtaaacaatcattcacaaagccaggtaaacagattaattttattctctggtatagtgccatcaggcctttggaaggattcaactatcgtgatgggcgtaagagcacaacaaaaagagaaaacccggcgttcgctggtggaagccgcattcagtcaactgagtgctgagcgaagttttgccagtttgagcctgcgcgaggttgcacgcgaggccgggattgcgccaacgtccttctatcgtcacttccgtgatgtggatgaactgggcctgaccatggtcgacgagagcggtttgatgctgcgccagctgatgcgccaggcgcgtcagcgtatcgccaaaggtggcagcgtgatccgtacctccgtgtcgacctttatggaatttatcggcaacaaccccaacgcgtttcgtttgcttctgcgcgagcgttcgggcacgtcggcggcgtttcgtgccgccgtcgcgcgtgaaattcagcacttcatcgcggaacttgccgactatcttgaactcgaaaaccatatgccgcgtgcgtttaccgaagcacaggccgaggcgatggtgacgattgtgttcagcgcaggtgccgaagcgctggatgtcagcattgaacaacgcaagcagcttgaagagcgactggtattgcagctcaggatgatctccaaaggcgcgtactactggtatcgccgtgaacaagagaaactggcacatcaaaccgaagagtgaaggtgagtaatgaaacagtcaggtcaggataaagggacgctgttgctggcattgatcgctggcttatccattaatggtacgttcgccgctatttttagctccatcgtgccgttttcgattttcccgctgattgcgctggtgctgacggtgtactgcctgcatcaacgctacctgaaccgcaccatgccggtggggttaccggggctggccgccgcctgctttattctgggcgtattgctgtacagcacggtggtgcgcgcggagtatccggatatcggctctaacttcttccctgcggtactgtctgttgcgctggtgttctggattggctcgcgcatgcgtagccgtaagagccagttaccagagtaaaggtttttgtcattgtaggccggataagcgaagcgccatccggcttttttggcaggtggcgcttcgcttacctgccctacaaggccacattacttcgccgtgagcagtactccgcactccatatggtgcgtatacgggaactgatcgaacagcgccagacgttcaaccttatgcgtctggcctaacgtttccaggtttttgcacagcgtctccgggttacaggagatgtacaaaatacgcgggtacgcctgcaccatcttctcggtttcgctgtccaggccactgcgcggcgggtcgacaaaaatcgtctcacactggtagctcttcagatcgattccttccagacggttaaactggcgtacgccgttcattgcctgcgtgaactcttctgcggccatacgaatgatctgcacgttgtcgatatggttggcggcaatgttgtactgcgcggcggccaccgacggtttggcgatttcggttgccagaacgcgatcgaagttacgcgccagtgccagcgagaagttgccgttaccgcagtagagttcaagcagatcgcccttagacccttccgtcgccttcagcgcccactccagcatctgcacgttcatcgcggcgttcggctgggtaaaactgttctccacctgacgatagaccatctctttacccgccaccggcaggcgctcgtcgacgtagtcctgatccagcatgattttggtttttgtcgcacggccaatcaggtgaacgttgatgttctgcgcacgcagcgcatcacgcagggcttcggcctgctcgcgccactcgtcgttcagggctttgtggtatagcagggagacaatcgcctggttactttgcgtggtcaggtagtcaatctggaacagcttgtggcgcagcaccgggttgttacgcacgccttcaacgatcagcgtcatcagctgattgataagctcgctcgctgccgggaagctgtccacgcgaatgcgggacttcgtctgctgatcgaaaatgatgtggtacaggtcgtcaccgtcgtgccagatgcggaactctgcacgcatgcggtagtggttgacaggagagcggaacacctcgggaacgggcgcgttgaaaggcgtcatcatactttgcaggcggacgactttctctgccagctgcgcgtcgtactgttctgtcgggaggtgttctggggtcatgatgtgtcctgagtgataaagaattacgcggcgattgtaggcattgttcaggggatgtccagagttaatggccaatagctgtctggacatccatacgtgtctaattgtagcattctgtttccggtctcctgagagtgaaaagggaatccagtgtaaatctggagctgacgcgcagcggtaaagactggcgggatgagcgttgtagacactgtgaaaatgggaagtcttcatccttatatagccacctagcccgaagacctgccgggatcacgtcgcatttggtttcatcatcgcgtgctatcgatgaggcctgcggcatccttcttatattgtggatgctttaacaatgattaaaaaagtatcgctgctgacggcgttgtccgtcacggcattttcgggctgggcgcaggatagcgcagactcgttggtggtgacggcaaatcgtttcgaacaacctgaaaaaactattctggctgcaacctcggttgtgacgcgtgccgatattgaccgttggcagtcgacctcggtgctggacgttatgcgtcgcctgcccggcgtggatacggcgcaaagtggtgggatggggcaactctcctctctctttatccgtggcaccaactccagccacgtcctgatccttgttgatgggatccgccttaaccaggcgggcgtcacggggtcgtccgatctcagccagttcccaatctccctggtgcagcgaatcgaatatgttcgtggaccgcgttcggcggtatacggctcagacgcgattggtggtgtcgtaaacattattactactcgtgcgaaggacggtaccacgctgaatgctggcgtaggctcgcacggctatcagaattatggcggcagtactcagcaaacactgggcgacagcacgcgcgtcacgcttgcgggtgattacacctataccaaagggtttgatgtggttgcggacggcaacaatggtggccttgcccagaccgatcgcgacggctttatgaataaaacgctctacggcgcactggatcacgcattctcagaccagtggagcggttttgttcgcggctttggctacagcaaccgtacggcctacgacggctactacagctcctttacccctgacgtactggtcgatacccgccagctctatagccagacctgggatgcaggattgcgcttcaacgatgacatctttcattcgcaactgctcaccagctatagccacagcaaggactataactacgacccaaatttaggccgctacgattcgacagccacgctggatgaaatcaaacagtacaacgtccagtggctcaactccgttgatgttggccatgggaacattggcgcgggcgttgactggcagaagcagagcaccgagccgggtacaaactacgtgaccaacggctacgacctgcgtaacaccggcgtctacctgaccgggctgcagcagtttggtgacttcaccctggaaggggcggttcgcagcgatgacaactctcagttcggtcgtcatggcacctggcaaagcagtgcggcctgggagttcgtggaggggtaccgtttcgttgcttcttatggtacggcctataaggcaccgaatctgggtcaactctacggtttctatggcaatgaccatcttgatccagaagagagcaagcagtgggaaggtgcgtttgaaggcctgacggcgggcgtgagctggcgcgtatccggctaccgtaatgacgttgataatctcatcgacttcgataataaccttcagcaatattacaacgtcggtaaagcgcgcattaaaggcgtggaagcgacagcatcgtttgatacgggtccgttgacgcatactgttggctatgactacgtagatgcccgaaatgccgcaaccaacgaacttctggatcgtcgtgctaagcagcaggtgaaatatcagctcgacacgcagatctatgatttcgactggagcctgacttatcactatctcggtacgcgttacgacactgactttggtacttacccgtctgagaaagtaaaaatgggcggtgtaagcctgtgggatgtcgcagtttcgtatcctgtcacctcacaccttacagttcgtggtaaaatagccaacctgttcgataaagattacgagacagtttatggctaccaaactgcaggacgggaatacaccttgtctggcagctacaccttctaatccgcgccctaccgtgctggtgtttgattccggcgtcggtgggctttcggtctatgatgagattcggcatctcctgccggatctccattacatctacgccttcgataacgtcgctttcccgtatggggaaaagagcgaagattttattgtcgagcgcgtggtggaaatcgtcactgcggtacaacagcgttatccccttgcgctggccgttatcgcgtgtaatacggcgagcaccgtttctcttcccgccctgcgtgaaaaattccagttcccggttgtgggcgtcgtcccggcaataaagcctgccgcgcgtctgacggcgaacggcattgtgggcctgctggccacgcgaggtacggtaaagcgtccttatacccgcgagctgatcgaccgtttcgccaacgaatgccagattgcgatgctcggttcggctgagctggtagagatggcggaagcgaagctgcatggcaaggcggtatcactcgacgagctgcgtcgtattcttcgtccgtggctgcggatgcctgaacccccggataccgttgtgttgggctgtacccacttcccgctactccatgaagagttattagaggtgctgccggaggggacacgcctggtggattccggagcggctattgcccgtcgtacggcctggttgctggagcatgaagccccggatgcgaaatctacggatgcgaatatcgcgttttgtatggcgttaacaaaagaaactgaacaacttttacccgttttacgccgttatggctttgaaacgctcgaaaaactggcgctatagcacggttttgagcaaaaaagagacggttgaaagttttttttaaaagaggggttgtcaacgtctgagaactccctataatgcgcctccactgacacggaacaacggcttacaggccgccgggttagcggggttcagagatgagcgccaacagagaaaagcgaaaataatcacttgactctgaatgaggaaaacgtaatatacgggacctcgcaacggtgagcgaaagccgcgttgcactgctctttaacaatttatcagctttttgaattgcgccgcgctgtagcagctggcggtcattaatcttatccaaaacgattaacgtttgaggctatcacgccaacttgataaggaggatgctgaagatgattacggctgaagaatgcagaacgtacaaagaatttgttgatctttaccaatcctatctttaccccttgcttggcgccagactgtcccggatgtattcccccaaaaacaaagtcattatcgatatgggcacaggtccaggttatttaagcattcagttggctaaaagaacaaatgcgcacgtgcatgctgtcgatattaacccggccatgcatgaaatcgctcaagaagaagctaaaaaaagcggagtaagcagcctgatttcatttgatttggaagatgtccaccatttatcttacgctgaccaatatgctgacttcatcgtctcctactcttgcctgcatcattgggaagacgttgttaaaggacttaaagagtgctatagagttctggctccgggcggaaaaattgtcattttggatacatttaatccccaaggaagccatttagagattatgcgaaaacaaatcaaagaaccggaatacttcaggtttgtaagagaggcatttgaagaaagttattcctttgaagacattcaccagtttgttcaggatgccggcattcccaattattcattagaaacctttcactttttaccggaggattttatagaaagcttagatgagctggaggatgctcccctgtgggaacaaaatgatcaaagtactgatcatgaaattgagtctgtcacatggatgttaacgatagaaaaagaaaaggaaggtgcattgtaatgatcaatgaatcaactgttttatccaaaaatccagaaatgccatcaagaaaatatttgaaaagcattattatagagccgggcatcactttaaatgaaatggcatcagatatttataaccatatcgacggcaaggtcagcatacatgatatttgctcaaaaatcgtcaatgaatatgatgttgattatcaaacctgcttagaagattgtatggagctgtttgagttgcttattgatcatgaagcaatcaaagttaagcagggggcatgagaattggaaaaacaaaaagtgcttgctttaccagacgatgtacatgagctgagtacacaccgttctaaatcaatcgtaaattacatcatcactctgcttgcctttgccaaaaaacaaggattgactcatcaagatattgtaagctggattcacgagcaatatgaggaaagaggatattatgatgagtggagacacattaacagccaacaaccagttggatcatttgtggaactctttataaaaggaagacgtttactttatgacaaaattgaattgtttgaaacagaagataaatatgtcgtaaatacccacacttggtatgaaaaagaacctagtgaggcctttttttattttgaaattgatcccgaagaattttctgcgtacgcttccattctcgcaatcgaaaacgcaaaacgtctcggaattaaaatcgatattgtaaaagaaacagatgtagagacagcttatatctataaacatcaataacgctattgggagggagacatatgtgcgggctcgcgggtattataaatctggctgctccccgttctcaggaatgtacctttcatatattgaaaggcatggcagatgccatcagctataggggaccggatgatgaacaatatcatattgattccaaagtcggctttgcatttcggcgattgtccattcttgaccttgtaaatggacagcagccctttttaaatgaggatggatcaatcgtcgttatggtaaatggagaaatttataactataaagaactgaaggcttctttacacaatcatatgtttaaaacgacatctgattgtgaagtaattgttcatttatatgaagaaaaagggattggatttgtagacgacatcatcggaatgttttcaatagccatttgggacaaaaataaaaacaaagtatttttagttcgtgaccgctttgggattaaaccgcttttttacacagagctaaaacacgagcttatatttgcctctgaaataaaatccctattttctcatcctcactgtccccgccaatttaattggaaagaagcactctcagacatttggctaagcggggaagcagccagtaatcataaagaaaccacttccttttttgtaaacatccaaaatctcgatgctggccattatctcgaaattaatttgacaacaaatgaacgaaaaacagcaagctattggtctttacaggatattttgctcaggcaaggctatcgtgagaatctccatcccgatgacctgattgaaggatatagagaactgctggcagattcagtccatagatgtttacaaagcgacgttgaagtcgggttgtttcttagcggtggcattgattcagctgcagtcgcacattttgctgcagaaaaacaggatctccatacgtttacagtattaagccaaagtacatttacaaatgaagatgcaaaatatgcccattggctggctaaagatttacaccttccaaatcatcaggttctctatcaattagggaacgatgagttattacaaccagagtcatataaacatttgttatggatctgtgaaacaccgttttgcggaccggaacaattatataagtttcatttacataagtatgccaaagcgataaggccaaacctgaaagtcatgctgaccggccagggcagcgacgaatttaacggcggttacagcacgacactttcaccagccgagaacccaagttgggaaggatttattgaatcggtcaatacgatggagatgaaccggctgcatcggctgcagggaaatatctttagagtgtgggaggagcattttggactttctcctataaacctttcttatttaaagagcaatgattccagccaagcagatccttggcaatcgtatgtcctgacaaaataccgtgatctgcaaatgtataattgctggcatgaagatcggatcgccgcggctaatcatatcgaaaaccgtgtaccgttcttggaccatcggcttgttgaatgggtttgcggaatacctgatggactccgtaaagacttgttatgggataagtcggtattgcgaaaatcattaacaaatgagctgcatacaagctatacccaccggccaaaggttccttttttctatggtaaggacgtgagatatacacataaaatgatgtttcatcttctgaagaaaaacaattatcagcttatagaggaggccttctctcacagcgatgcctccagcataatacaggttgaacacattcatgccatcatgacatatttggaggatgatcctgagtttacaaattttgaatttttattaagactggtgaacatgggacttttatcaaaaatgactaaagaaaccccttctgttcaattagacataaccagccatttagaatcgataacaataaaagactggcactcacaggaaggtgatattgccagtcgtttaaatatctcagccaataagtgtgaaggacaagatattttggcgctaaaccctggcgtcactctgttaaggccggaaagcgatagtgagcattgcatctacattgcggaagaaggatttattcagtttattgtttcggaggaagacgtcggagcttggctgcatattctctgcgatattaatggaaaagacacacttcatacgattttagacagacatggtgtcagccttgaagaagtggccaaatatattcaagaagccatcgaacacaatatcattttgatcaaacaaaaaaatctgccagaaggagcatatagatgagcatcttttattcgttttccgcacttaggggattagcaatggggattttttcgcctatttggattctttatctgatatctaaagattatgatttccttcagattggattaatgggagcggtacttgaaattgctaagcttatatttgaagttccttccggcgtttttgctgatcgttatggaattaaaatttcaattgccagttcattctttttctccatccttacatgggccttcttcccttttatcgattcagctgctatttgcatactggctatgatcatatgggctttatcagattccttaatttccggttcttttgaaacttggatgagccgtgtcgcaggggaagatcgattcggcaaagaaatgatgaaaaacacacaattgctaatcacttttttaattattggaagtattgccagcgggtatttgtattcattaaatatctattttcctttcctgctcgttatggtgatctacttattactatttatttggatgtctgtatttattaaagtcccttctgtttccgaaacaaatcatggggatcagaaccaacatgattcgataaagattatcaaagaaagtttaaaaattatctttaacaaaaaaagggttcttttaatcgtcatagccggtttctttacagccacagcctatgacacaatttcccgttactggcagccttttttgagtgatttaggcttttcagaaaagtcactgggatatatttttgccctaggagggtttaccgctctcgttcttttgacattaaccatcaggttcgaaaagaagatcgaaaaaaatccatatctcgctttaacctcattggattccatgggcatggtcatgacttttctattgtctagagcattcaggccgctgggcattccatgtacagcgtttttgcttgcaattgaagatattcatcatccgatcgtaacaagttacttaaataagtttttccccgattcatacaagaacacacttttctcgttaaactcaggggtaggagcaattggagaaattctttccggtgtcattttcggcatcatttccgcagcctttgggctctctgccatgtttgttgttgtagctgtatttctattaatccctattatcctttatacgatagtgcctaagattaaagacaatgatatgaaagttcagattgaaaaatcccagcaagtgtaaatgttttgtatcacagtaagaagaccttcttattaaaagaaggtcttctgctattctattcagttatttcccaaaagccatcagcttcgtataacttccaatataaagtgttccgtcctcagcgagctgaggagaagacacgacgttgctgtcggtttgatagctccataattcattgccgtttgcgtctgccgcataaaccttcatatcatctgacccgaaataaaccgttcccttcgcgtcaatcagcggcgccgttctgacagggccgtctgtgtagaatgaccagttcatatccccgtttttgctgatggaaaacagctcgccgcttcctgagccgatgtagatattgccattatgatcaatcgcaggagatgagctggagaacccgtttagcgggaatgtccatttcaaactgcctgttgatgtataagcatacagctgtccatcttggttgccggcataaatgtttccgtccttatcaatcaccggatatcctttaaacgcatttgacgtcgttctggaccatttcacctgtccggttccggagttgatcgcataaaacacgtaattatatgtgccgacatacacggtgccgtttttggcaagcaccggcacagagctgacgaccccatttgttttcaacttccagcgctctgtccaggttgattttgacgtcggtttgatcgcgtgaacataattatcaagtgttgagaaatacaacgtcccgtctgaaccgatcaccgtttcagagcttggcccgccgcttaacggaaccgttgttaaaatttctcccgtttctttgtcaataaaataaatctttttgtcataggatgccaaatagataacgccgttggtcccaagtacaggagattgcgtatatgtttttccaagattgcccgtcacccatttgactgagccgtctggattaaaggctttcatttccccgtctctggaatgaagatatactgtgccgtctccgtcaatcacagcccccgctccattttgcggagtcgttctgatgtcgttttgccatttcagcgtcccgtctgtatttccggcgaaccggctttcgcgtgaccagttaaacatggcaggcgccatcgcttgtacatcatatcttcctggcaaaaagccagatgctccattattttgagaaaacaccgtttccgccgcataagcagctgtcggctgaagcactttggcagcgggcacatcagaaacagcgccggccgaaacagccgccgccaccgcagctcccgcaatcaaagctttcatacgaaatgacttgaccatcattgagacccccattatatgtaacttctaatttgtgaccatcataacatattcatccattttataaatctatttcacaaaaacatcacaaactagaaaactatgtaagagtattcacggacgttttttcagcacccgatcgaaatgcagccacaaaccaaatgacgttgacagcagccgcagcgagactaactcccaaaacaaagatcacctcagaaagcagatggtcactaaagaaactaaacatcaagataaaaccggccgaagacaaatgaatcaaaagcccgaagccgcaaagcaccgccatgacatacctcattgcatcgactccgagcatataaacgagaaatggaatgaaatacaagacaaggatcataccgacagctgaccacatgccagctgaattaaactgattggccgccgctcccgttccggccagcggcgaaagtgaagccgccacaatcacggcgcaaaaaagaaacgcagaaatggttgtcatgatcgccacgctatttttttttgacatcaaactcctcctttaatagaaatattaaccttttttattataagtaagttgaatgttatattcattatatttttaaaaaattccagaatacatacacaaatgctatgcttctttctagtatatttatatagtaaaaaacaaaggataaaagactcatttttctgtaatatcaggattttatcaccataccatattgcatgtacatgtttttcaaagtatactattccagattaattcagaggagagagaaaaatacatggaaaaaccagcaggattttggattcgttttttagcttattttattgacggcattattgtatctgttcctagttatattattctatttattatcaattctgtgtttgtagctggggctgtggcaacaaacccttacatgacggaagaagagtatttagtgaaatacatgacgcttgcatttttgcctactatgctgatcatgatcgtcatcagcgtgttatattacgggctgctcacagcttctaaaatgcaaggcacacttggcaaaaaaattcttggcctgaaagtggtcaatgaacaaggtgaacgggtttctgtcggacagggaattggccgttactttgcctatatcttatctggaatcatcttttatatcgggtttatcatgatcgcctttggagagaaaaaaggcctgcatgacatcatttgcaaaacacgtgtcgtgtataaataatagaaaaaagtctagacgccaataggcatctagacttttgttttctttgcaataggctgccacgacagatacgtagcgcttctccacaaccactcaaacggccccatccgaaagacacgaagccaaaggtggctgaagaccatttgaacggcacaaacagcaattgtaatgagcacaccggcagcagggtacacttttccatacaggcccaagccgtaatgataaaaaatccaagtacacacaatagactgcatcaaataattggtaaatgccatcctcccaacagcggagaatgattgcagcactgttctcactcttgttttatgataaagatagacaaccgttgtaacatagaaaaacatgaggaaaggcgcgccaatcagcaaacatatttctttatccgttacactgtacagcacctgggcgccgatgccgatgacaagcccagccatccataatcgttttaatcctttgcgatgcttttccggttcatgcaaataccgtgattttgctgccgcagctcccagcaaaaacatgctgaaatatggaatggatgcaaagaagtagttgagcggattatacgtaagcatgccattcgaagacatgtaaacaagacggtcgtggatccgctgttctgcaatatccttcaggctgccgcttccataaacatgaatcgcttgttttgcctgctgtgttaccgcttgtacccattcctgtccgtttgattgatcaaaacttgtcaacatgaacggaatggaaaacagaagatacaaagagaccgcccatatcagcagtgttttcggctttgcttttcgaaacaagagcaggacaaatccgagcagggcatattctgttaaaatatccccgtcccatatcaaaaaggcatgaatcgttccaaacaagagaagcgccattaaccttctcacatataacggaacaaaccgtttccctttgttttctgctctctccatcatgacaaccatgccaaatccaaataaaaaggaaaacaataaaatacattttgtttgaatgaagaatttcagtatgtctgcggcggcaaaatcagcttcagaccacttatccatgaaaaaattctcttttccaagcatagacaaatacatatccggataactgaaatgtgccagattgacaaataagatgccgaaaatcgccattcctctcagcacatcaagcacaccgatccgctcatttgttaaagtcggctgtaatgaagacatagccatcacgctccttttttctgtaccttaagggtaggaaaaaatgaagcgcggtaacatcgatttaggtgtcaggccggcatgaaaaccttacaatcttgtcatctttatggtttcatcacctttaaatctaatgcttcgatattctgcaaaatgcgatcaaagcgcaaagcctgaggctcacatgggaagatgtggccttcatacgggtcgcctaacgtccggaaaaacggttcaaataaaccaggaaccaatacgcccaccatctttgtatagtgagaatcaaggcgataggagtgaacggtatttgcagggacatgcaggaaatctcccggattcagctgaatttcctggccatctgtccacatcgtcatctggccttcaaggcaataaaatgtttctgtatgatattcatggtagtgatcaacgattcggtcacctttagggccttcagatgatacgacgataaactggccatctgtatttttttgtgcagccacaatgcggtgaagctgatctccagtcaacagacgatctccttctccagattcaagaacgtatggaaccgctccatctggcagctctgtaagttccgctaatttggccgaacatgcaggctttgcttcatctagaaatacaatgtccgctacagcggctgcttctgcaaatcgctcgtttgagacttcttcgcttgcgtacggcggatgttcagcgtgatcatacggattcccaataacggaatacaagtgcgctacgtttcctttcatcgtgtaagacaccagtcttgttctgtggctctgcatccggtagctgtgcggtgttcccgccggaatgttggcataatcacctgatattaataaatagcgttcaccatcaagtgtcagttccagtttcccgtccaaaacgagaattccttcatgtgtgtccttgtggacgtgaagcggaaaggcatctccttttcccccggaaagaagcacgatctcaaacaaatcacctgtgctcctcccattcgccatcaccgtggcaacctgtctgccgaacagatagcgctcgccttctccgctccggagcaaataaggcattttttctttaggcaatgaatgtgtacataatgttttcatattatcgcttcctccaatttagaccagtctatatattatcattcatttgtctagaccgttctatataattgtaggagaaaggataacaaaatgctaccctttttttctcaccagcactggtatttgttcggcaatgagaagaagaggcgttttgtctttattcgttaacgaaagcatgatgccgccctcaatcatcgaattaatcagcgttccaagctgatttgcttcttcttctgcaaatccgttttccattaattttctggcaaaaaccgcttcccagcttttaaacaccttcatgcaaaccgtccgcagcggttcactgattaacgctgtctcactcgccagcaaaccgactggaatacctttaatgctttctgtgttgtcaaattggctggctgtttttttgataaaaagctgaatcgcttcaacaggatcagaggattcatccatgctttgctgtatcagatgttcaacgatcttacctgtatatgtaaccgcttcaattgctagttcttctttgccattcggaaaaaagtgataaagcgatccttttggagcaccgctttcttttacaatctggttcaaacctgtcgcgtgatatccttgcagctggaacagacgtgacgccgtgtgaaggattttttcacgtgaatctcctctgctagtcattaaaacattccctcctaggtatggtagagcgacttatataatataaaaaagaaccctgtgattgtcaaaaggggtaagacccttccggatggggtaatgtacaaaaacagcgtctaggagggatctctcaatgacaatcgatcattcagtcacaaatacagagcagcttgaacaacagaaccccgccataaaaacaaagctcaaactgaaaaagcttaaggatcaggtgatcgtcattaccggcgcttcaagcggtatcggacttgtcacggcgagaatggcagctgaaaaaggcgcaaaggtcgtggcagcagcgcgaaatgaagaggcgctgaaggagctcactgatgaacttaaggaaaaagggcacgacgccatatgggtaaaggcggatgtcggaaaagaagaggacgtcaaccgcatcgcagaaaccgcgatcagcacattcggccgctttgatacatgggtcaacaatgcggccgtctcgactttcggacacgccatggacgtcaccgtcgaagacatgaagcgcatgttcgacacaaatttctggggacctgtttacggaacaagagcggctgtcaaacactacaccggcagaggtgtgccgggcgcactcattaatgtaggaagcctgttcggagacaggggaacggtcattcaatccacatatgcatctgccaaatttgcgcttcacggctggacggaaagcatccgaatggagcttgaaaaggaacaggcgcccgtctcggtaacgctcatccacccgggcagaattgacacaccatataacgagcatgcgcacagctacctcgacaaacagccggctcattaccgctccatgatctatccgccggaagcggtcgccgaagcgatcctgtttgccgccgaacaccctaagcgcgacatgtacatcggctcacaggccaaagccatcgccatgctgggcgcgctttttcctcgtctgaccgacagactgatggaaaaaatcatgtatcacagccagcatgccgaaagaccgtccaatccgagagaagaaagcgctctttatgatgctggctgcggtatgcatgacagaggcacaaataaaggatggatgaggtcaagaagctactacacaaaagcgacgaagcgcccaattgtatcggcggctgttgttgccggactagtggcttgggctgccgccaaacgatgcagataatctctgaccataagaaaaacccatgctgttccagcgaaccatgggtttttcagctgttaatcgataaaagccttgttcatacgctgcagcagctcgccgaacatctctttttcctgtgttgaccattctttcagcatctgttcataacgttcaaggcgcttttgctgatcggcttttaatagttgtttgccgagttttgtaatggtaaacaggctgactctcccatcagacgggtctgagaaacgatagatgagctcctttgcctctaatgcagctgcttgtcttgaaagagtagaaatatcaagcttaaacgattcagccaattccttaacacgagcaggcccaaactcatccaattgtctcagtaataagtacgaagatctctccaaattccctgttcttttctccgattgatccagataaacagctctcctgataaaagtcgtcagctcatattcaattaattcaactggattttgattttgcaatcgctctcgctccctattccaatctccggcattgacaacatcatatatacttgtataatacaaatgtacattaactgaataaatacaagtcgttatatgactaaatcaattattatacttgtatagtacaatcatataaaaagaaagtaaagcgattcctcagaaccatcctagaagcaagcaccagaaaggaggaagctgttctgattggagagcagcacttgatgtgaaagtcatacgaattattttgcaagtgttgatattatatgtattttttatgatcggggaagccattcagcatctgtttcatttacccgtgtcaggaagcatcgttggattggtattgcttctgatctgcttgggcctccgtattgttcccgtctccatcattgaagacggagcagggtttttattatccttccttccattgttgttcatcccggcaatgacaggagtgataaactatccgtctctcatttcattcaatggcctgatgctgctgattacagtcgttctcagcaccatcgtcacgatcattgcggctggattcgccagccagctattagagaaaaaagcaaaaaaacgggaggagaaagagaaatgcagcaagcatgtatcgcgatcattataattcttttaacagttgccgcttatttagcgatggtcaaactctataagcgattcccgcttccatttctgatccctgttctgacaacgacaattttgattgtagcggctttgatgatgtttcatgtttcctatgaaggctatatgatcggggggaaatggatcaattctttgcttgggccggctgttgtggcgctggcctatccgctttataagcaatggcatatcattgtcaaacattgtgttcccattttaggcggcgtcctggtcggcttatgcatgggaatgatcagcgggctgatcttcgcagaagcattcgggattgatcatgatctcttattatccattctgccaaaatcgatcacaacccctgtcgctattcagatcgccgccggtcttggcggcgtcccttccatgacagtcgtatttgtcatgattgcgggcttttcaggcgtcatcctcgggccgcttttcctaaaatggcttcgcatacgcagctccctaggacaaggcattgcattaggcagcgcctcccatgcactgggtacctccaaagcgttggaatatggggaattggccgtatccatgagttccgtctccatgacgctttgtgcggtgctcggctcattcttcggcccgctcgtcgtctggctgtttcatatttaacaaagaaagactgccccgggggagggcagtctttttcgtttaagaagcaaaaaaatcaatcaacggctgaaagtccttagataaatcaacgtcattcggttctgcttgaagcaggcggtcaatcatacgctccagctcctcaacatcattcttatccgtatattcaatgaagtttaagctttcaagccaatcccgatatgaatgtttggctttgccatagctgtttccaaagacaaggcaaggtgttttggtgataatcgagaaaatcatcgcgtgaaggcggtcggtaatcaccaatttactggagccgatgcggtccagcatctccataaaatgcttttcacgatcagcgtaatcgatggtgtctaccgtatccagcaccgtatcggtacgctctgtgtaagttgttttttctgcccattgcttcatctgtgaaataaaatcttcgtcagtcactttctccttatccgctcttaaaataaagagaacgccgtcccgctcgagctctcgcggcacaatatccaaggaaagcaccatgtccggtgtaaagatcacattggagttgaaggtctctttcacaacatccagtgtttgcgtctcacgcgcagcaatcgttaagtttgtattttgatggtacgcatcctgtgtttttttcttttccttctgtccttcctctgtatcctcaaaataaacggattgtggcagagaaattgatttgtagtctttaaacgccgaaaagacctttcttctgtcttcctcaatatcgagataaaggtttcctaaattccctccgcctgtaaagcagacaatatcgtcttcacgaatgatctccttcaccagttcaatgccctcatccgtcgcataatccataatctcaatgtattcataatacggaaaatgatttttgataaatttctcttccgcatacgcaatcgcttggtcgccaatgtttgtgtagctaggggaaccaaacaaaaatacttttcgtttatcatttaacagagcttccggctccacatttggcgcaatgccttttactagttttttgcctttgatttcttgtacagtcatatctgcgtcctccttctgggatgaattcctcattgtgtgttaactgtctctacccaaaaagaaggatggctatgcattggcatgtgcatcggctatatcagaaacatcgttttcgccaatttgatagacgctgcaatgtcccgcgccgttctttccatatattccgcggcatgttcaaacgcgtcttctagtggcacggctccggggacgatgctgaaaagcgcatcgattccgtgttgatagacggcattactgtctcgggaaattgatcccgcaatgccgataacgggcacatcgtatgatttagcggccttggccaccccgatcggtgtttttccatgaaccgtttggctgtcgattcgtccctcgccggtaatcacaaggtctgcatcctgaacgatactttcaaaatcaaccgcttcaaggacaatatcaatgcctcttttcaggtcagcctgaagataagttagcaggctccatccaagaccgcccgctgcaccggcgccctctgtatctcggaaggttgatccgagcgctttttctgccatatcagcgaaatggcttacgttctggtctagtacatccaacatgtcggccgtcgcgcctttttgcggcccgaaaacagccgtagcaccctttggtcctgttaacggattgtccacgtcacaggcaacttccagtttgacattccgcaatctggaatcaagcccgctcacatctattgatgcaagctgagataacgcgccgccccctgggccaatctcgctgcctgagttatcaagaagccttccgcccaatgcctgaatcatcccggctcccccgtcgttcgtggcgcttccgccgattccgatgatcaatcgctccgctcccgcatcaagagctgctccgattaattctcccgttccccttgttgtagtgatgagcggatttcgcttatctacaggcaccagatgcagccctgaagcagcagccatttcaatcacagctgttctcccatctcccatcatgccaaagaaagctctcaccggttcccccagcggccctgtgacaacttgctctatgatccttccattggtcgcatcgaccagagattgaacggttccctcgccgccatccgccaccggcaattttctgtaatcagcacccggaaagaccgatttgaaacctctttctatcgcttcggctgcctccagagctgataagctttccttaaaagaatcaggtgcaatgatgattttcatccaaatcgcctctttcaaaacatgattcacttaacctattgatctccaatgtaccataattgatctggaaatacataccatgcaatatggtaaaaatttaaataaaaattagaaatgaaagtgtttgcataaaagaaatattcacgttatcatacttgtatacaagtatactccttgagtgaggaaggtgagtgtatgctagactccaaagacctgttgtatcccgcaaaatggctctcaaaagcgtcaaccggagttcgtgtcgcatacgagctgagaatgcggatcgtttcaggtctgattgaaagcggtaccattttatcagaaaatacaatcgccgccgagttttcagtaagccgttcgccggttcgcgaagcgctaaaaatactcgcatccgaaaaaatcatccgcttagaacgaatgggagcggtcgtaattggtttaactgagaagaaaatcgcggaaatttatgatgtgcggttactattagaaacatttgtctttgaacggcttgtcaaaatagacattgagcctttagttaaggatctcagcaaaattcttgaaatgatgaaagtctcaatcaaatatgaggatgctgacgaattttcatttcaagatgtgctgttccatgaaacgattatccgagcgattgatcattcatacattcagatgatctggaacaatctaaaacccgtcatggaaagctttattcttttatcgatgcgggtacggttaaaggaaaagtatgaagacttcacaaggattttagataaccacgagctttatattcaagccatcaaaacaaaggatagggcgctgatgattcagtctcttcaccaaaactttgatgatgtgcaggataaggtagaagacctatggctctcacaacaaatgctggcaaaaggagctgaatacaacaatgactagttatatgttaggaatcgatatcggcacgacaagcacaaaagctgtgctgttcagtgaaaacggagatgtggtacagaaagaaagcatcggctacccgctctatacaccggacatctcaacagctgaacaaaatccggaagagatttttcaggcagtcatccatacaacagcgagaattacaaaacagcatcccgaaaaacggatctctttcatttcgttcagcagcgccatgcacagcgtcattgcaatcgacgaaaatgacaagccgctgacgccatgcattacatgggccgacaacagaagtgaaggctgggcgcataagatcaaagaggaattgaacggacatgaggtgtacaaacggacgggaacaccgattcatccgatggcaccgttaagtaaaattgcctggatcacgaatgaaagaaaagaaatcgcttccaaggcaaaaaaatatatcggcatcaaagaatacatttttaaacagctgttcaatgagtatgtcatcgattactcattggcatcagcgacaggcatgatgaacctgaagggcttggattgggacgaagaggcactgcgcatcgcaggcatcacgccggatcacttatccaaactcgtgccgacaaccgagatctttcagcactgcagcccggaaatagcgatccaaatgggaatcgatccggaaacgccttttgtcatcggcgccagcgacggcgtgctgtccaacctcggcgtcaacgccattaaaaagggtgaaatcgccgtcaccatcggtacaagcggtgccattcggacgattattgacaagccgcaaaccgatgaaaaagggagaattttttgctatgccttgacggacaagcattgggttattgggggacctgtgaacaatgggggcatcgtccttcgctggatcagagacgagtttgcctcctccgaaatcgaaacagcgacacggctgggcattgatccatatgacgtgctgacgaaaattgcccaacgcgtcagacccggttctgacggtctgctgttccacccatatctcgccggagaacgcgctccgttgtggaatccggatgtacgcggctcatttttcggcttgaccatgtcgcataagaaagagcatatgatacgcgcggcattggaaggcgtcatttacaacctgtacacggtgttcttggcgttaactgaatgcatggatggcccggtaacccgcatccaagcgacagggggttttgcaaggtcggaggtttggcgccaaatgatgtcggatatcttcgaatcagaggttgtcgttccggaaagctacgaaagctcatgtctcggcgcctgcattttaggcctgtatgcaacaggaaaaatcgattctttcgacgccgtgtccgatatgatcggcagcacatacagacatacgccgatcgaagactcagccaaggaatacagaacattaatgccgattttcatcaatctatcaagattattagaaaatcaatatacacaaattgcagattatcagaggggcttaatcacacacaaatagtacatgacatgaaggggagggcattaccatgccgttaatcatcgttgcacttgggatcttagcattactatttctgattatgggcttaaaattaaacacatttatttccctgctggtcgtatcgttcggcgtggcactggcactcgggatgccgttcgataaagttgtcagctccatcgaagcaggaataggggggactcttggccacatcgcgctcatcttcggactcggtgcgatgctgggcaaactgatcgcggattcaggaggcgcacagcgcattgcgatgacgctcgtcaacaaattcggtgagaaaaatattcaatgggccgttgtcattgcctcattcattattgggattgcgttattttttgaagtaggactggttctattaattccgattgtctttgcgatttcaagagaattgaagatttctattttatttctcggaatcccgatggtcgcggcactatccgtcacacacggtttcctgccgccgcacccgggacctacggcgatcgccggtgagtatggcgcaaacattggagaagtgctgctgtacggctttatcgttgctgttccgacagtgctcattgcagggccgttatttacaaagttcgcgaaaaaaatcgttcctgcatcatttgcgaaaaacggcaatattgcatcactcggcacacaaaaaacatttaaccttgaagaaacacccggctttggaatcagtgtctttactgcaatgctcccgattatcatcatgtcggtcgcgaccattatcgacctgcttcaagaaacaatcgggtttgcagataacggagttttagcttttatcagattgattggaaacgcatcgactgctatgattatttcgttattggtcgcagtctatacaatgggcatcaagcgcaacattccagtcaaaaccgtgatggattcttgttcaactgccatttcacaaatcggcatgatgcttttgatcatcggaggaggcggcgccttcaaacaagtgctgatcaacggcggtgtcggcgattacgtagcagacttattcaaaggaacggcattatcgccaatcattctggcatggctcatcgcagcgatcctgcgcatttctctaggatcggcgactgttgccgcactaagcacaacaggtctggtcattccgttattgggccattctgatgttaacctggcgttagtcgtactcgcaacaggagccggaagtgtcatcgcttcacacgtcaatgacgccggcttctggatgttcaaggaatacttcggattaagcatgaaagaaacattcgccacatggacattgctggaaaccattatttccgttgctggactgggattcattttattgttaagtttagttgtatgaaattaagaaggagctgtaacacatgttcaattcgattggtgtcataggcttaggcgtaatgggaagcaacatcgccttaaacatggcaaataaaggcgaaaacgtcgctgtctataattacaccagagatttaacggaccagcttatccaaaagctggatggacaatctctcagcccgtattacgagcttgaggactttgttcaatcgttagaaaaaccaagaaaaatctttttgatggtcacagcgggaaaacccgtagattccgtcatccaatcattaaagcctttgcttgaagaaggcgacgtcatcatggacggaggaaactcccactatgaagacacagaaagaagatatgacgagctgaaggaaaaagggatcggctacctgggagtcggcatttccggcggtgaagtcggtgcgttaacagggccttccatcatgccgggcggagatcgcgacgtctatgagaaagccgctcctatcctgacgaaaatcgcagcccaagtcggagatgacccttgctgtgtctatatcggaccaaaaggggcagggcactttacaaaaatggtgcacaacggcattgaatatgccgacatgcagctgattgcagaagcttatacgtttctaagagaaacgcttcgtctgccgctagatgaaattgcatctatttttgaaacatggaatcaaggtgagctgaaaagctatttaatagagattacagctgagattttacgcaaaaaagacgaaaaaacaggacagcctctgatcgatgtcatccttgataaaaccggccaaaaaggcaccggaaaatggacgagcatgcaggcgattgataacggcatcccgtccacgatcatcacagagtccttgttcgcccgctacttgtcatctttaaaagaagaacggatggcagctcaagatgtattagcaggcccggaagccgaagaaaaacacttggataaagacacttggattgaatacgtcagacaggctctttacatggggaaagtatgcgcctatgcacaaggctttgcccaatataagatgtcatctgagctttacggctggaatctgccgctcaaagacatcgccttgattttccgaggcggctgcatcatccgcgctgatttcctaaacgtgatcagcgaagcattcagtgagcagccaaatctggctaacctgctgatcgcgccttatttcacagataagctccatgcctatcaaacaggcctgcgaaaagtcgtttgcgagggtatcagcaccggaatctctttcccatgcttaactaccgcgctctcttattacgacggctaccgcacagggcgttccaatgcgaacctcttgcaggcacagcgcgattactttggcgctcacacgtacgaacggactgatatggacggcgtcttccatacgaattggtctgaataacctgtattaaaaacacggtcagtttcaactgaaccgtgtttttttcttctatcccaaacaacagaagacataagttatgttttaaatatcataaacagtgatacaataatagctagaaacaatccccaagatcatcatgtgacagcagattgctgttccgttctattctgcttttggccattgtcctttgcccttgaccatggtgtcataaaatgttcaaatgccaaaacggcctggcattctgatttacaaaagtccctgaaaaccttatctaattgagaatcagcctctcatttattataaaagaaatgcctaaatcctacctgtcacacctttattaagatgaaaaaaagtaggttatggcttgacaaaaaatatatattaattaataattcatatataattagaattattattgaaagcgattatgctttctaatacatttttaggaggaatatacattatgtctttaatcggtaaagaagtacttccattcgaagcaaaagcattcaaaaacggtgaattcatcgatgtaacaaacgaagatttgaaaggccaatggagcgtattctgcttctacccagcagatttctctttcgtatgcccaactgagcttgaagatcttcaagaacaatatgctgcacttaaagaattaggtgttgaagtatactctgtttctacagatactcacttcgtacacaaaggctggcatgacagctctgaaaaaatcagcaaaatcacttacgcaatgatcggtgacccatctcaaacgatctctcgcaacttcgatgttcttgacgaagaaactggccttgctgaccgcggaacattcatcatcgatccagacggcgttatccaaactgttgaaatcaatgcaggcggtatcggccgtgacgcaagcaaccttgtaaacaaagtaaaagcagctcaatacgttcgtcaaaacccaggtgaagtttgcccggctaaatgggaagaaggcggcgaaactcttacacctagccttgatctagtaggtaaaatctaaggagtgcattcaattggtacttgatgcaaatatcaaagcacaattaaatcaatatatgcagctaattgagaatgacattgttctcaaagttagcgcaggcgaagatgacacttctaaggacatgctggctctcgttgatgagctggcttccatgtcatcgaaaatttcagttgaaaaagctgaattaaacagaacgccgagcttcagtgtcaatcgtgtcggagaagacactggcgtgactttcgccggtatccctctgggccacgaattcacatcattagtgttggcgttgctccaagtgagcggcagaccgcctaaggtagaccaaaaagtcattgatcaggtgaagaagatcagtggtgaataccacttcgaatcttatatcagcctgacatgccacaactgtcctgatgttgtacaagctttaaacatgatgagcgtgctgaacccgaacattacgcacacgatgattgacggtgcagcatacaaagcagaagttgaaagcaaaaacatcatggcagtgccgaccgtttacctgaatggcgaatccttcggaagcggccgtatgacgcttgaagaaattcttgcgaaaatgggcagcggcacagatgcatctgagtttgctgacaaagagccgtttgacgttcttgtggtcggaggcggacctgctggtgcaagtgcagcgatctacactgcacgtaaaggcatccgaactggtgttgtcgctgagcgcttcggcggacaggttctcgacaccatgagcatcgaaaacttcatcagcgtcaaagcgacggaaggaccgaagctagcggcaagtcttgaagagcatgtgaaggaatatgatattgatgtcatgaaccttcagcgtgcgaaacgccttgagaagaaagatctgttcgaacttgaactcgaaaacggcgctgtcctgaaaagtaaaacagtgatcctttcaacaggtgcacgctggcgcaatgtcaacgtccccggtgaacaagagttcaaaaacaaaggtgtcgcatactgcccgcactgtgatgggccattgtttgaaggcaaagacgttgcggtaatcggcggcggaaactctggtatcgaagcagcgattgatcttgcaggtattgtcaatcacgttactgtactagaattcgcgccggaactgaaagcagacgaagtcctgcaaaaacgtctctacagcctgcctaacgttactgtcgtgaaaaacgcacaaacaaaagaaatcacaggtgatcagagtgttaacggcatcacatatgtagaccgcgaaacaggcgaagaaaaacacgttgaacttcaaggtgtattcgtccaaatcggtctcgtgccaaacacagaatggttagaaggaacggttgaacgcaaccgcatgggcgaaattattgtcgacaaacacggcgcaacaagcgtaccaggcttatttgctgccggcgactgcacagacagtgcgtacaaccaaattattatttctatgggatcaggtgcaactgccgccctcggcgcgtttgattacctaatccgtaactaatataagaaatccgctatattgccagattggcaggatagcggatttttctttttctacagaaaaaaaccgaaccaggcactacggtaaaagtgctcgattcgagcgcttcttatagttcctcaccattcgtttgaatgacatttttataccactcaaaggagtctttcttatatcgtttcatggatccgtttccttcattgtcacgatcaacatagatcatgccgtagcgttttttcatttcgccagttgtgaaggagacaatatcaataatgccccacggcgtgtagccaattaaatcaacaccatcgtacgtgaccgcttttttcaatgcttcaatatgcgattttaaatattgaatgcgttccggatcatgaaccttgccgtcctcctccagcgtatccactgcgccaaagccattttcaacgatgaataacgggatttggtatcggtcataaaaacgatttaacgtatatctcaacccggttggatcaatcgcccatccccagtcactcgaagtgatgtacggattttcgacaccattcggcaagccgccatttacaatatcgccagtgttatcatttttcacatcgcttttcacagttgttgacatgtaatagctgaagcctaagtaatcgacggttccgtttcttaaaatctcatcatcgccgtcttcgaatgtgatgttgtagccttcgcgttcaaattccttcaacgcgtagcttggataataaccgcgaacctgcacatcagggaagaaatagcgctgcctcatttcttcttcagccagcatcacatcttcaggattggaggagaaaggataaatcggcacgtgtgataccatggccccaatctggaactctggattgatgtcttttccttttgccactgctaaggcgctcgccactaattcatggtgcgccgtttgatacatgacttccttggcgttttcgttttcgccaaccacaacacctgaattcgtccataggaacagcggattgttcacatccatttggttgttaatctcgttaaatgtcatccagtacttcactttatctttgtaacgggtaaagcaagcctctgcgaagttgacgaagaagtccacgactttccggtttctgaagccgccatattctcttgccaggtgcagcggcatttcaaagtgagacagggtaatgaccggctcgatcccatgcttcagcaattcatcaaacacatcatcataaaactgcaaaccagcttcgttcggttcagcctcatcgcctttcggaaaaatccggctccagccgatggacgtccgcagacattttaatcccatttccgcaaacaaagcgatatcttccttgtatctgtgatagaaatcaatggcttcatggtttggataaaattcgttttcttcaatcgtgtcagtgatttttctcggcacgccgtgcgcacccgctgtcatcacatcgacgacactcggccctttaccgccttgattccatccgccttcaaattggtgggcagctaaagcaccgccccataaaaaatcctttggcatgtttcccatgtttaattcctcctcagcttacgactgtaaatattttttgatgtaatgcactttcctcaatgtcttcaatgaaagctttatcaaactcaacaagcacttcgccttttttgacggtatcgccttcttttaccttcaaggaaaaaggcgtgccgtcaaatgtcaccgtatccagcccgatgtgcgcaagcaattcgacgccggacgctgaacgcaggccaatcgcatgctttgtaggcgtaaccatgacaaccgtaatgacgccgggatggtagcatcgatttcacgatatccttcgctttaggggtagaccgcttcagcaccaatcgaagtctggtagcgcagcgagaagccccaatcacattctcttccccgcctacggcctctaaaatgtcttttgctagtctcgtataatctctcactttccccgacatttcacccaccccttcgttttggttacgctttcattataattgtaacggtataatttatcaattccgaaacaaaatatttacgcactaactatcattgtaagcggtttatgctataattttgacaagtgaaactaaacgaataaatgaggaatgcgtatgttaaaataccagcaaatcgcaacggaaattgaaacatatatagaagaacaccagcttcagcagggagacaaactgccagtcctagaaaccctcatggcccagtttgaagtcagcaaaagcaccatcacaaagtccctcgagctattagagcaaaaaggcgcgatctttcaggtcagaggaagcggcattttcgtcagaaaacataaacgaaaaggctatatcagccttctgtcgaatcagggatttaaaaaagatctcgaggatttcaacgtcacctcaaaagtcatcgaactggacgtgagaaagccaacaccggaagcggcggaaaacctgaacatcggaatggacgaggacatctactatgtcaaaagggtccgctacatcaacggccagaccctttgctacgaagaatcctattacaccaaatccatcgtgacgtatttaaacaacgaaatcgtctcccactccatcttccattacatccgggaaggactggggttgaagattggtttttctgatttgtttctgcacgtgggccagcttaatgaggaagaagcggaatatttgggattagaggctggactgccgaagctgtatatagaaagtatttttcacctgacaaatgggcagccgtttgattactcgaagatttcgtataattatgagcagtcgcagtttgtggtacaggctaatagttttttattatagggctcttcactacggtaggtggtcgacatgtacaaaattatcattcctgccatactagccatctttgcgctctggatactcttacagatttcactagagatgagcatcgttaagaatccaatgaactactttatcgtattcattatctttttcctctttgtaaagatggtgaaagaaaaacaataatagtttgggcgatgcaaacagaaaaacatccttcccttaacaaactcagccagtcacatgcattaatcttgatgttaatgatatataggtgcacataaaaagctacttcattgtgaagtagctccctttattaaaggcccattttgatccatctagttttagaaaagcgaaggacaatcgcatttatgataataattgaaactaaatacaaaataataaataaaacatcattactcccaagtgtcatgttatcagattgcagcactctttctattcgggggtacatagtgttacctgcctcaaaaggagcaatgaaaccaaacgttttattgcttatagctactaagataacagaagtcatccaataaacgatactgacacctatactaattaatatattaggacataacacgcttatagttccgataattagaatatactgcagtataactgcagaaaataaaaaaagtaataatgcaaaatgcgaaaaatcatggtacatcaacgatatgattagcaggcctagcgttataaatgcaaaacattctaaaaataaaacagctatctttttataaaagaaagtatagatgttctctccaattaacttgtaaaagagaatatttttgtttgaatactctctattaataaagaaagctataacaaatgaaaataacatcaaaccaaactgggtcgcaacagtataggagctaaagaaaaacatttcaggtgtaacattactgactttatcgattccaacaagtaaaaaataacccagcaaaaataaaaatacaaacattgctcctaaaataatgataactttgttgctaatactctttttaaactctaatttcatctcaagcccccactgttttattactcatttatatacacttcaattaatttatccactgaatgatattgttgaatttcttggtgattaaatatataataatccccttctatcgcctttaaatcagacaaatcatgtgtaatgttgatgataatcttctcggggttctcctgaatatacttgtttaagaagccatgaatctctataaccgtttttttgtctaatgaattcgttatttcatctaaaacaataatatttttatcctctaataagaaactgagcaattttaatttttgcttttgtccatcactcaaatttttgatcagaacttttccatcaatattatccagattaagtaaatatgcgattttatctatcatttttgcatcaaattttttactcaaaaagtgtaataaaaagtccttagaaacatcattaggtatattcgacgagctggatattaaagaaacattttgacgaatatctctgccgattcttttgctattattcaacaaaaagtctttagcaagctgtgatttaccgactccattttttccgacaacgtgattaattttcccgctcgaaaaatgcaagtcggtgtcctgaagtaacgttttgcctttcacttttaaagtgtaattcgctatattcatatacatactcctaggaaatatttgcataataataaaatgttctgccttgtgatttgttactaatgtctaagcttttgaggtacctctttcgtttccgatccggaagcgaaagaaatgtttttagatggctaatttggagatcttttactctagtttacaatatataatatccaatgtacaactgaattcactgcaaggccaatccctataatttgaatcgtaagaactaaccaatgatttgtcttaaaacggctatattcatctaagctcagaaaagctaaaagaattttgtaaccatcagaattcaatattgggattaagttccacaataaagtagacgagaaaagcataaatgccatagttaatgcttcactggaaaatgtaaattgatttattaattctaatgtatttattaaaagataattgataaacaagccaaataaatgaacgattatcttttcatttcttgatagcatgtaggtttcattcaattggacataaaaagcaggaaatacataaaaattcagtttgaatcccactttatcaaagtttttcccgaaaaattttaaggaataaatatgtcccagttcatgaagcactatattcattataaaataaataactataattatccacattttccagccgtaaaatactgaggacaatccattttgcaattttattaaatgaatataatttaatatgaacatgagagccgtaaaggataagaacagataaaaaaactttggtgatactttctctttatacattttaaaacgtaataattgtttatctgacagagaatttaaactatttttatagtattctccgctttttttgtcttttataaatacgttgttttgcacaagcacttcatatttttcatcttcatactttaaaattttcattatagtatttttccatataaggatagaagtagtttattttttctgcagagttgaataaggaaccacaaactccacaaatagaggaaaattcataaggaatgtcaaattcctctattttgttattttcttttaaaatattcaaaaaccatttgaatccttcttttctaagaataaataatagcaaattggaatttaacttttccacggttctttcgaaactttggttatattcttcccttagggttattttcgtttcaaaaatagcaggggaacaacatggataaatttctccatcatgatgatatacaatgtcatatccgggacaatgtaaggaatcttcatcttcaagactgtaaaatttatgtatgttttcttgcttaattctagttttagcagcgccaactgatatcattggaaattttgttatctttacacctaagattgaatcccccaattcctctaaaatgtggttggacattttgtctttggtaactgccatattaagagaaatatcgatatcagggtatttcctgctatgttctaatatgtttttaatactggaagacttgacaaatggagcatggtactcatcataacttatagtcagtgctatcacatttaaagaattcatatcatgaaagtactcctggacctttttcttgctcaaaccccaaaatccattagagatcaacgttatttgtttttcatatggtttaatgatttccattagttcttttaaaaatttataatctaaaaaaacttccccacctgtaaaagaaatcacttgaatggttttgttttttgcaaattcagttactaactctcttatgtattctttttccatcctggttgttgaagttggtgaactagaaaaacaacaatggtcacaggatgcattacaccttgaatctaaattgattgatactgttttattatacatgaaatatcccccaacaaatggtaaaggagagttagactctcctttgtacccctctaattaatgaccacttccaagaatccagcgattttcttttgattttacaaaataccaaagatcattcacttttgctaacttttgtgattcatctaatagacccttaaattctaagtttttcacagtctcattgttagtgatttcctttttcatattatccctcctccttttctaatataaaccaattattctatatcattcaatacatgtcaatatattgtacctaaaaaatctgaaaaatgtcactattcttggtatataaagcctatagtcctctagcccctctaagctataccgaatgaaaggccatagtttgatttaaagcttcgtaatgaaaagtaaaacatcaatattgactacactagttaagggatatacagattttaagtggaagaaatgaggcaaacaatcttaccctaaaccaacctgtactgaaaagctgttttaagctcttgcttaccccatttggcacctctttctctcgttttaattgtctctaaaagcagttatgcggtactatcatataaaggtccaatgtttaaaaataatgtcatacttttaaattcaccttatcatgcacatgctcataaagaggggtttattctaaaaaggggatggacggttttggaaagcaagtacctagatctactcgcacaaaaatacgattgtgaagaaaaagtggtaacagaaatcatcaatttgaaagcgatattgaacctgccaaaaggcaccgagcattttgtcagtgatctgcacggagagtatcaggcattccagcacgtgttgcgcaatggttcaggacgagtcaaagagaagatacgcgacatcttcagcggtgtcatttacgatagagaaattgatgaattagcagcattggtctattatccggaagacaaactgaaattaatcaaacatgactttgatgcgaaagaagcgttaaacgagtggtataaagaaacgattcatcgaatgattaagctcgtttcatattgctcctctaagtatacccgctccaaattacgcaaagcactgcctgcccaatttgcttatattacggaggagctgttatacaaaacagaacaagctggcaacaaggagcaatattactccgaaatcattgatcagatcattgaacttggccaagccgataagctgatcaccggccttgcttacagcgttcagcgattggtggtcgaccatctgcatgtggtcggcgatatttatgaccgcggcccgcagccggatagaattatggaagaactgatcaactatcattctgtcgatattcagtggggaaatcacgatgtcctttggatcggcgcctattccggttccaaagtgtgcctggccaatattatccgcatctgtgcccgctacgacaacctggatattattgaggacgtgtacggcatcaacctgagaccgctgctgaacctggccgaaaaatattatgatgataatccagcgttccgtccaaaagcagacgaaaacaggccagaggatgagattaagcaaatcacaaaaatccatcaagcgattgccatgatccaattcaagcttgagagcccgattatcaagagacggccgaactttaatatggaagagcggctgttattagagaaaatagactatgacaaaaatgaaatcacgctgaacggaaaaacatatcaactggaaaacacctgctttgcgacgattaatccggagcagccagatcagctattagaagaagaagcagaagtcatagacaagctgctattctctgtccagcattccgaaaagctgggccgccatatgaattttatgatgaaaaaaggcagcctttatttaaaatataacggcaacctgttgattcacggctgtattccagttgatgaaaacggcaatatggaaacgatgatgattgaggataaaccgtatgcgggccgtgagctgctcgatgtatttgaacgattcttgcgggaagcctttgcccacccggaagaaaccgatgacctggcgacagatatggcttggtatttatggacaggcgaatactcctccctcttcggaaaacgcgccatgacgacatttgagcgctatttcatcaaagagaaggaaacgcataaagagaagaaaaacccgtattattatttacgagaagacgaggcaacctgccgaaacatcctggcagaattcggcctcaatccagatcacggccatatcatcaacggccatacacctgtaaaagaaatcgaaggagaagacccaatcaaagcaaacggaaaaatgatcgtcatcgacggcggcttctccaaagcctaccaatccacaacaggcatcgccggctacacgctgctatacaactcctacggcatgcagctcgtcgcccataaacacttcaattccaaggcagaagtcctaagcaccggaaccgacgtcttaacggtcaaacgattagtggacaaagagcttgagcggaagaaagtgaaggaaacgaatgtgggtgaggaattgttgcaggaagttgcgattttagagagtttgcgggagtatcggtatatgaagtgaggggtgtggggttcagggatggtgatatgctgctcccctaaaagtagatagatgaattttagaaaatctgtttgccttggggagttttttcatggctggacaattatactacaaggaagaaatactaatacttatagaatgtaattgggtaatgattcggagaaagaggttgcgaaataatatggtattacactgaaacaattatcaatggagaacatgcacgatatagccgttctatattctccctctattatggcactcattagtagacataaccgtaaaaaaatgcactcaaaaaaagtccattctatataactctcgctagggtggacctttttcaacattcaaagtactagattttttctagtgaaagaataagaaaagacataagttctattttatcactctgttataggttaagttattacggtgtttcattatatactgaatttaaacacccttgacattatgggaatttttaaaacaggttaaaaggaagttctataagaactccctagtttaatattatttggtcaaaatctaaaaccaaaaaatctatttttatcttcattgtttctatctaattttgcaacaatcatacctttcgactctaattcttgaaggtcatctaataataattcatttttatttattgttacaaaatattgtccgatcctattctctaacagacttgaattgatatgttttaataatgtaccttttacatgaggatcaggattagaataagatccgtcatgaattaaaatattcaaactacacttatttatacacctgtataaaaaccaagtaagatcaaatatatttatcttcatatggagtctaccatgtgaacgttcatccggtatagaacaagaaattttgatccttcctgtagttgattgttttgcgttacttattctattatcatattcaaaatctaaaaatccatgttggttgtatgtaacatccattagattattaaaaagcttctttaactcactaactatagcgctataagattgaaactcatcataatacattgaattaactcttaatatttcatgttgaagttcattaatcttatcaaaaatatggttttttttatcgtagtcactaattctcaatcttacttccgctaactctatttctttccttctttgttcttccatcacaatggaaatatcctcaatgaaattgttactctttaaaattctggcacttgattccagttgttctgttaatccttgctttttgatattaagtttttttaaatcggcttgtattttaacaattttatctttaaaataactccctctactttctaccatgaaattatagaactcttggactttattataattctgttttacttcctctggaaaaaaacctacaatatcttcatagaatttttctatattttctaattctttaatcttagttacttttttatttaaatcatctatatttctttgatattgtttacaaatatgttcattttcaaatatttcattttgtattttattaagttcacttttaatttctgagtacctatttgtatcattattatatttattggcagtcttagtttgatagataactctattgtaatcctctatctcatttattaattcatcttccttaacttttaaatcgccaatgttaatattcattgattcaatcaattttatttcactatttaatttttcaatcttatcccgaaaaacctttatgtttttttctgtatgagttggtaaagtaaaaagatagttaagtaatttatattgttttaaccctcccctattcggtaaaactatatcattaaaccctgtcttttcgtctcttataatatactcccttaacgccgcaaaagttatatcctctttctcaccctttaaaatttccttttcaataaattttttatatacacttatactaacttttttccattcctccaaattaaaagttaaagaagtatcatgtaatgtataaccatgtttaggagaattaaaagatctagcaaggaatacttgatttccatcaatttccacattcaaaacaataaaaacgtttttattgagaagaatttcatttgtcgtataaaaatttgatatagtcttccctagtaaaaaggagatgcattcaatcatcgttgacttacctacaccattagtctcttcatgatcttctctcttttcaccaagtattatatttactcctacagcattaaatttatactctttcaaaatttcttgggaattgcaaacaaaaagattttttataatcataacaatcactaactctccgttctgctaatcatattttgattaaaagaaactttacctaatgaatataaaaaagttaacgataaatacagtatccgttcaatattcaaatttattataataccttgactcttagcataatcaagaaaaagttgatcaatatgtttttccttctctaacagttcataaagtatctttgatgagtataaaatattttcttccacagcattatatttagttaataaaaaatgattcatttctggcctctccgccttttccttttttaaaggagaattattcactagaggaataagatcatttccaatttgaatgtttttaaactcattttctaataaaacataagagtatttgagaatattttcagctgtttcaattttaagatcaatcattcttaacacttcttttgttatcattaaaaatctcacattcataaatgcaccaacatgttaaaatcttaatgtattttttcgttaaagcctttgaatatggtaaaactgaatgacattctagataaatctcattaacaatttttacaaatatctcatctccattattatattgattatgaaactctagatatttgtctactatcgtctcagcaatcaattcctttttatcagcacttacatacgaagtggaatccattatatggtttatcacaccaaaatactcagaataactatcgaatttccgtttaaaagtttccccacttttcatatcataaaattttttatctaaaccaatttgattatcaaaattactagtaaatgttttataactttctctatactcatgaaaatctataataaagctcttaaactcatcttcatcaattttatcatcgttatcttctatttctttttcaataaggctctctaatctattaatcttataatttaacttcccttcctgtagtctccttcctccttggttgttttttgaccagtatttatattcggtattccaaatgtagtatgttacttctgtctcgccattatctaaattcacatccaccgaaataaattctggagtagcatactcatcctttataatggctccacttactaattctaagaatggattttcatttgtatttgcagtaatattaaatgaagaatcatgtacatgtcctgccaaatatagatcaataaagtaatcatcaaaatgtgcctttattgattctctttcggaagattcaatacaacctaacgtatggtgcccaatagctatatttaataccttgcccttatttttctctttgttcatcttccttattgctttatataatttcatctgtgcagttaataacgttccttcttcaccttttttatctgataacagacatgtatttattgataaaacattatacttctccgattgatacaaaaaatgcaaatcttcttccggatatttaacacccataaaatcttcataaaaatcgaaaaatttcctttgaccttccactaatatatttgtagctttttgatctagtttatccaacatttctgaggggttaggagatttcataatactatcaatcaaaagtgtcctcgtcatgtctctagatatatcgtgatttcctggcactaagtgtacgttattcttacttaatcccatacttttaataattccattaagatattctttaacatcttcgttatacacatcacctttgtgtgctatatctccagttaataataaaaaatcaaaatctgactctcttcttaaaacttctataaaatctaataatttatctctcattacaatagtgtcataattttgaaactgaaaatgcaaatcagaaatttgtaaaaaacgtaccttcaatacaaacatcctctcataagtatatttatcccctatatatttctagaaaactttttattctatatcatctttactctttaatatattaagactctttccacaccatcaaataaattataacctaaacataactctttactcattttagtattgtatttaagtcaaacattgcattggttgctgaaatattatattcattgaattattccattaaatagcttttagttgaactttagtctttctgtaatggtggagatgctcttacttatgataaggctccccacgattaatccgaaaagcccgataaatctgctccactaaaataagccgcatcaactgatgaggaaatgtcatcttcgagaacgatagcttctcgtccgctcgcttcatcaccgtgtcactcaatccgagtgatccgccgatgacgaaggtgactttgctttttccataagtagccagcttatctattgtatcggctagttcttcggatgttttcatttttccttcgatggcgagggcgatgacgtgggcgtcggggctgattttggataggatgcggtcgccttctttgtcttttatgattttcatgtcctggtcgcttaggttttccggcgctttttcgtccgggagttcgatgatgtcgatttttgcgtaggccgaaagtcgtttggtgtattcttcaatgccttgcttgaggtatttttcttttagttttccgattgtcacaatattgatattcacaggtcatccccactttaaaaacaagttattcatatatgttgtccacaattgtggatatcttttctgtattttgtgtaagatcattcgttccccactatatatactgcggggtctccacataattcacaggctgtggataaactgttagtatgttcgatttttctgatttcgggcggcagctcgtggtcgtctatgtacatatccagcaccgtttcgatgtgttcttcacaagaataatacgcttgtttcatgttcaaatcctccgatgttttcttccatttttacaaatgttctcttctcaatataacctatttattcacatgttagtagtgcttcgggctgagttttatccacaattcgacaaacaagctgttgatgactctatttcgctcgtgtgttagtttggatgtaaccgatgtgtggggaggtctgcatttgcgctttagatgggtttggctttttgtgattatgttgctgcttgctgagtgtcagccatcttattgggtgttggagaaggatcgaatcggtgaaggcagtccagacttagaaatatacgctaattatctccaaatgcatgatgacgtgaaaggatatcaagtcttcaccatatcagaaggcaaaaaaatggtcgtcgtgtctctcggaagcagcgagaaagataagaagcttgaagtgtcggacgtcaaattctcatctaaagaaacgattgtaactgtggagcgaaaacctgctcctacggcaaatgagaaaaacccttttattttgattggactggacaaaattgaaggggatttaattgttcaagacgaaacaggagatcgctttgaagaaacggattaccagcaataaagccggcgttctgagaacgtccggctttttcttttacttcaatgtcccatgcgggtcgatgacgaattttttggctgcgcctttgtcgaagtcgctgtagccttttggcgcgtcgtccagagaaataacggtggcattgacggcttttgcgatctgcgctctgccgctcaggatcgctttcatcaaattgcggttgtatgtcatggcgggcgtttgtccggtgacgaaggtgtgggctttggcccagccgagtccgaagcggatttttaatgagcctgttttggcgtccgcatcctttgcaccgggatcttcggtcacgtataagcctggaatgccaaggctgcctccgacctgggtgacgtccatgattgagttcagcacggcggctggcgcttctccttgattgccgtgcccagatgcttcaaagccgacacagtccactgcagcatcaacggttggttcacctagtatttgttcaatttgctcgccgaggcggtcgtgtttttgcacgttgaccgtttcacagccgaagcttctggcctgtgccagcctgtcttcgttcagatcgccgacaatcacggtagaggcgcctaggagctgagcggagtgtgcagctgccaagccgacaggacccgctccagcgatataaacggttgaacctgtttgcacgcccgctgtataagctccatggaagccggtcggaaaaatgtcggacagcatggtcaaatcgagaatcttttctagcgcctgttctttatcagggaataccaaaagctgaaaatcagcgtatggcaccatgacatattcagactggccgccgacccagccgcccatatcgacgtagccgtaagccgatcccggccggtccggattgacattcaggcacacatgcgttttctgcgttttgcacatcacacagcgtccgcaggcaatattgaaaggaacggatacgatatctccttttttgataaattcaacatcacgccccgtttcaatgacttctcccgtaatttcatgcccgagcaccaagccttctggcgccgttgtgcggcctctgaccatatgctggtcgcttccgcaaatgttggttgtaatgactttgagaataaccccatgctcacattttcgattcacattcgccttcgggacgccgggcccgtccctcaagattaactccggataaccgatatcctccaccgctacagtccctttgcctttgtacacaaccgctttgtttcctgtcaacgccattcctcccattcatgtgtttggactctccgtccttgaacatgacttcggttcggcatgactctttccctttttcacgactgttttttctgtattcttacaacaacaaatatgccaagaaagcatccaataatggttccgccgatgtctaagaagtcgactttacatccatttaacaagaacacagtaatggccgaaaccaggcagatcataactgccagaagaataacccgatttgtctgcatgtaattcctcctttggattcgtttctaaaccatacccaaaatcctctgcaaacttcggttcaacaaaaaaagagacttcacaccagtctcttcataaacagagatcactcaaaaaatttcctgagaaataatgtggcaacactcgttactaacgcaattgccgtatacataacaacccaaaatatgaatgagctattccccgaagctaacgtaactaacaatatcaagctcgtgataagaacgatgagcggtgccacccaaaatcttttaaataaaaaatgacccgctataccaaatacacctgcgacgatcggaaaaccaaaaacgataaataaaacggcgatggctcccatactaccctccttgccttaaaacctcttcatcacctcaacatcatacagcttcaaatgactcttcggcgtcacgacatcctttaccttcccaatctctttttctttcattttctttccggttttcaggctgtactgttcaatgtaggcaggcttgtgatacgtgtatgtgaagaaatagaggctgctgcctttttgggtgatttctttgaattcggctttcattttgtccggggaaagggtgaagacgatgcttgtttttcctgtcttggcatcgattttgtgtacctttccgaagccgtcaatgaaatacaggttcccgtcataagggaaaaagctgtttttaaagctgaagggcatggagctgtatatcgtttgttcgtcgtttttgtattcggcgatatcgtgcagctctacttcgccgctttttttgttgatcttgaccatttgatagagatcgtgggctttttggccgcgaaccataacatacacagcttggtcgtccacggcaagttgggattcgactgaggctccttcccggtactgccattccgttatgctgagataggtaagcttcttctgatctgcttgaatctgaaggagctgatagccttttccgtcatctgtcgggacgagtgcgtaaatggcgccatcatggaaaccggaggctcggatgtagtaggggatgacgtcttttttccactctccgtccatttggcggtacagctctgagcggtatccgtctccctttttgtcgtagccggagttgtataaggtgtaaaagccgtccgtgttttgcagaaagcccgcgctgtcgcctgtgtgctgataggttcttttatgggagcgcaggccgtttttgatcgtataaatcgtgtttttgtcctccagcatcacgctgtcaccgtgaacctttgctgagcccagctcaaggcccttcatctgaaaggaagacagcgtcccgtcatggctgataaacagggcgtagcttttcccgccgccaaatgcatcttgatccgcagaggatgagaaatacagcaggacttctttgtcatccaggaaatcgggatttctgagatcctgctgactcacggttttatggcttttgagaggagaaatgaagacaaatagtgcgattcctgcgagaatcagcatggcgatggtaatcatccactttttcatagccttctccttagtaaatggtcataatggttgtcgtataagaagaactagtgatgtcgcgcggatacacgcctaagcctccgttgctgtctatatcaatccctgctttcagcaaaaaggcagaccataggagctttgaacagtttttggcgccgtcatggccggtatttctgttattgacgaagttaaatgagtatgggtcgccgacttttgataccgcccagtcggcagcagctgttttttgagatgaggatacgctgacggtttgcacaatggagttgtcttccacgtctctggcattatacgcgatctgcctgacgccgtcgctcgggacagattcaacaattttgtcagcggcggagtacatgccgacatggccgtgattgtagtaggctgtgtaggagttcgtgtaatagatattgcctttcgcgcttgtcgggagttttttcgtgccggacgagccgcccatgatagacatgccgctttccttggcgagccggtccccctctgctttatcagccgtgatctccttatagaactgttttaggataacgtcctgctttacgtgctgctgtttggcaatctggctggcagatttcatgatttcttccggtgtcgtgcctggctgcagtgcggcgatttcttcagcataatttgtggtctttacggctttggcgggagtaacaaacaggccgccgcacattgtgagcgctaccaaaaacatcgacactcgtttcttcaacttcattacatctcctcttttcttgtgagtgtaggaaaggtaatttcctcacccacattatattaggaaaataaggaaagtaactaggttatttacagaatttttagaaatcgtttacagaaaaaggcctttatcaggcccttttcgttaaagcttcttgctcatcactacgtctgtttcttgaaatccggtttgctcatatagctttcgagccgtctgattatgggcaaagacatgaagggacagcttgcggattcccatactgcgtgccgcttgatctaatgccgccaatgcttgctttgcgtagccctttccccgatacggttcatataacccgaaatcataaataaacgcttcctgctgcggatgctccggttcagcatgtatccagagccagccaacgatatccttttcattcagcttgaggctccacaaatggtgatggggtgtttcgagccctctcggaagcagatcagtaaacacctgcttagacaaaagctgggcatcttcaggcagccatgttcccgcttttaccttttcttccgcgtaatgctttgttgtgtacgtgagataagaccgaaattcttctgtctgcataggggttagcataattgtcatatcatctctccttcatatattgactagaggattttacataaaatagaaagaggtgttactatcagaataagcaactgagattgataagtcactagagaaaggagtttcacatgaataagatcgcacccgcagaaatcgctagcatgctcaacgattggtaccttgccatcaagaaacatgaagttgaagaatcctcccgtttatttgaagaagtgaagcctttattggatgacatggaagaggatcaggaggtgcttgcctacttctccttattggaactgcgccacaaggttttgcttcacgaggcgagaggacagggctttcagcatgaggagccttctcatatgaatgctacgtctgacatgctgaaatattacttttttctgtttgaaggcatgtatgaggcctataaaaataattatgacattgccattgggctgtataaagatgcagagcagtatctcgacaacattcccgatccgattgaaaaagccgaatttcacctgaaggtcggtaagctctattataagctgggacaaaatattgtgtccctcaatcatacacggcaagcagtcaaaacattcagagaagagacagattataaaaagaagctggcttcagccctgattaccatgtcaggcaattttacagagatgagccagtttgaagaagctgaggcttatttggacgaagcaattcggatcacgagtgaattagaggatcatttttttgaagcccagcttttgcataacttcggccttctacatgcgcaaagcggcaaatcagaagaagcggtttcgaaattagaggaggctctacagaacgatgagtatgcccgctccgcctattattatcattctgcctacttgctgatacgagagctgtttaagatcaaaaagaaagaacaggccttatcttattaccaagacgtgaaggaaaaattgactgctgagccgaatagaatatgtgaggcaaaaatagacattttatatgccatttatgcagaagggggtcatgcggaaacgtttcacttatgcaaacaacatatggatgacttgttgtccgagaaagagtatgacagtgtaagagaactttccattttggctggcgaacggtatagggaacttgagctttacaaagaagctgcccactttttttatgaagcattacagattgaagaactgattaaacgaacggaggttatataaatgaaaagatttctgattggcgcaggcgtcgcagcggtgattttatcaggttggtttattgcggaccatcaaacccactcacaggaaatgaaagtcgctgagaaaatgattggataaatgaaaaacccccgcgggatgcgggggttcaatttaacgaaagaatcctaaaacggtttgtagttttaggattctttcatcttttcagcgtgattgaaaacccttgaagtctaggaagaacgagcattggagcgcagcgaatgtttggaattcgtgagcaccgaagcgcaggcctgacaacgaatgcgagggtttgtcgacacgctgaaacccccgcgggtgcgggggttttcttattacagcagcttcttccctaacagggattctacgagctctactgctgttttgcccgttttgtttttgtgatcaaggatcgggttaacctcaacgaattcggctgaggtaatgatgcctgcgtcatacagcatttccatagccaaatggctctcccggtagctgatgccgccgacgacaggggttccgacacccggtgcgtcgttcggatcaagtccgtccagatcaaggctcagatggacgccatcacatgctgataaataatcaagggtttcttcaatgacctttgtcatgccaagacgatcgatttcgtgcattgtgtacaccttcatgccgctttccttaatgtacttgcgctccccttcatcaagtgaccgggcgccaatgatgacgacgttttccggtttgattttaggcgcgtagccttcaaggttaaccagtgactcgtggccaatgcctaggctgaccgcgagcggcatgccgtgaatattgcccgatggtgaagtttcaagtgtattcaaatcgccgtgcgcgtcataccagatgacgccgagattatcgtaatgcttcgctgtgcctgcaagcgtgccgatcgcaatactgtggtcaccgcccaggacaagcgggaattttttctcttcaatgactttgttgaccttttgcgcgagtttttcatttcccgccaaaacggaattcaggtttttcagttcctcgtcatttttgattttttcgcgattgatcggaatgtcaccgagatcttcaaccgtataccccatgtctgacagcctctcgatcagatgagcgtaccggatggcactcgggcccatatccactccgcgtcgtgcttgtcctaaatccattggcattccaataaccgaaatcgttttatccatctgtgattccacctcaacatttaagataatgtcctatgcgggttataacaaagatgacttgcggacaacgtttttaaagctctagctgacgatttgcctgctggcgttttttaatgacgacatgataaatgatgtagcaaatgatcataaacggtacgccgcaatacagcgcgatacgctgctccggatcaaatgcaagactgatgagcacgaccgtatttaacgttaggccgatcagcggaagcaccgggtacagcggtgttttaaatttcaaatcttctatcttcccgccctcacggatatatttgcgtctgaacatgatttgggaaagcgagatcgtaatccagccgacctgcgcgctcatgcccgccaaagataacagtaccatatatacggtttcagcctgcgcaaactttgtcagaagtgataggcaggccacagccatcgttacgattaacgagtacatcggtacaccgcgctgatttgttttgccaagcgctttgaaggcttgtccttcattcgccatcgcgtacagaatacgtgttgatgcgtataaacctgagttcgcaacagataacagtgcgattaaaataacaaagttcatgatatcagctgcatatgggattccgatttgctcaaatacggcaacaaatggactttccacgacacccgcctgtttccacggaatcatgccggcaatgacaatgattgaaagcacaaagaacacaagcgttctccatactgtctgtttgatggaccgcggaatcgttttttcagggtcttcactttctccggctgcaaccccgatcagctcagtcccctgaaacgcaaagttcacagtaatcatcgtaatcagcattgcctttatgccgttcggaaataacccgtcttcataaaaatgtgtcaaaaacggcgcctgctctccgcccttcagatcaatcaggccaaacatggcagctccgccgagaataataaataaaaggataatcaaaattttaatgcctgagaaccagaattcagattccgcaaaggcttttgtggtgatcgcatttaaaataaacatcagtgccgcaaagaccagacaccagatccacacgtctatatgcggaaaccagcgttgcatcagctgccccgctgataaaaattcaatggcgcatgtaaccgcccagccgagccagtacagccagccgaacgcaaacccgaaggccgggctgataaatttcgtggcataggtctggaaggaccccgacacaggaaaggcgactgccagctctcctaagcagagcatggtcaaaaacatgataaagccgcccactaaataggacagaaccgcgccgagcggtcccgcttggttaatggtaaacccggttccaaggaagaaaccggttccgatcactccgcccaatgaaatcatgaacaaatggcgtgatttcattgtccgctggagctgatttccgttatcttggtttgtattcacattctgcaccccttcagcaacttgtattggatctaagctggaacatctgcatggtgctatcccagtttgctgtccaaagagtctctatctatttaatataaaattcacttcttctcataaagatacattatactaaaatactgtagctgagcaaatagggagtgctgatttttctgttgtaaatttatacaaacgaagtgaatatcccgccatggtgcggatttatgcgtttcgcagcacgtgcttaattttctctatcgcccaatccaagtcctctttggaaatgattaatggcggtgcaaaacgaatgactgtatcatgcgtttccttgcataaaagtccctcttccttcaaacgctcacaatacggacgtgccgcttcagtcaattccacaccgataaacagccctctgccgcggacttctttaatgacagggctgtcaatactctcaagctcgcttttaaagtattcaccaagttcaagagaacgatccgccagcttttcatcctccagcacttctaatgaagcgatagacactgcacatgcaagcgggtttccaccaaatgttgagccgtgtgagccagggttaaacacgcctaggatctcgcggtccgccgcaatgcaagagatcgggaacacaccgccgccaagcgctttgcccaagatatacatatccggaacaatgccgtcccagtcacaggcaaacgtcttgcctgtacgtccgagacccgtctgaatttcatccgcaataaacaagacattctcttccttacaaatcgccgccgcttcctgtaaaaatccttcaggcggaatcacaatgcccgcttcgccttgaatcggttcaaacaagaatgccgctgtattcggcgtaatggcctgtcgaagcgcttccacatcgccgtaaggaatgagtttgattcctggaagcatcgggccgaatcctcgtttatattcctcttcagaagaaagagataccgccagcatcgtgcggccgtggaagttcccgacacatgcgataatttccgcttgattgtcagctacgcccttcacttcatacgcccagcgtctcgccgctttcaccgcggattcaaccgcttcggctcctgtattcatcggcagaatcatctctttgcctgtcagtttagctgttttttcgtaaaacggcccaagctgatcgttatgaaacgcgcgtgacgtgagggtgattttatcagcctgatcctttaatgcctgaatgattttcgggtgtctgtgcccctggtttaccgcagagtaagcactcagcatatccatatattcattgccttccgggtcctttacccaagcacccagcgcttcagaaataacaatcgggagcgggtgataattgttggctccgtaatgagacgtctgatcaataatttctttggatttagataaagctgtcatatttgaattcccccttgttttctgtttcaacatgttatcctgctttccctttatataaatgcaagttctgtgccaaatcaagaattcgtgtgttttctacaattttcgaggacaaggtgcaaaaacattctgatatttcgagcgaaaatttcagcaagtgcaaaattcttttgcatatcctctccgtttttttataaaatagaagcaatattaagaaaataattgagggaggttcatacagtggtcaaagacagcgaattcctcacattggtttttcagagtattttagatgaaatcgatgttggcctgcacgtggtagacgagcatggaaacacaatcgtttataacaataaaatgatgcagattgaagatatggagaagcatgacgtcttgaataaaaacctgatggatgtgtttatgttttcaaagcagcaggacagcacactggtacaggctcttcaggaaggcaagacgattaaaaacgtcaaacagagctatttcaataataaaggccaggaaattacgacgatcaatcatacatatcccatcgtccaagacggcaaaatcaggggcgccgttgaaattgccaaggatgtgacaaagctggaacggctgatcagggagaatatgaacaaaaaaggcagcacaacctatacgtttgacagtattctcggcaccagtccggccattcaagacgtcatcgaaaacgccaagcgggcaacccgtacgtcatcatctgtccttctagcaggcgaaaccggcacgggaaaagaactgttcgcgcaaagtatccataatggaagcgatcgttctggcggcccgtttatttcgcaaaactgcgcggcactgccagacagccttgtggaaagcattttgtttgggacgaaaaaaggcgcgtttaccggcgctgtcgaccagcccggcctgtttgaacaagcccacggcggcacactgctgttagatgaaatcaactcgctgaatctcagccttcaggcgaagctgctgcgcgcccttcaagaacggaaaatcaggcgcatcggttcaacaaaggatacaccgattgacgtacgtattattgccacgatgaatgaagacccaattgatgcaattgcaggcgaacgaatgcggaaggacttgtattacaggctgagtgtcgtcacactgatcatcccgccgcttcgggaacgaaaagaagacattttgcttctcgcgtcggagttcatccagaaaaacaaccatctgttccaaatgaatgttgaacacatcagcgatgacgtgaagcaatttttcctttcttatgactggccgggaaatattcgcgagcttgagcatatgatcgaaggcgcaatgaatttcatgacggacgagcaaacgattacggcttcccatctgccctatcaataccgcatgaaaatcaagccggctgacatcccagagccggaaacaccaagacaccagccagccgcggacttaaaagaaaaaatggaaagcttcgaaaaatatgtgatagagaacgtgttaagaaaacacggccataacatctcgaaagctgctcaggagcttggcatcagcagacaaagcctccaatatcggctgaagaaattttctcactcgtctaacgaataatccggagcaggaagcctgatcagaaaaacagtgcctctgccgatttcacttttcacttcaatcgtcccattgtgattgtcgataatcgatttcgttatggcaaggcctaatcccgaacctccatatttccgggagcgggatgggtctgccttgtaaaaccggtcaaacactaaaaaacgtcacttcttatgcattgaagaaagaaaatggcacctatgtgtatcacagccagcaaccacacggtacaaaccattaaagtccatgcaaataacggaagtatttgcagctaactgccatttgctgtttcacgtgtaacatccatcttgtatttttcttcatattcgatatatcctttttcaactgaacgggcgtgacccctgttcagttttttttgcatatcaaaacagcctggcaacgatgccagactgcttttattaactgcctaattggtctgcggaggacagcttgatatcaacagatttttcttttccgccgcgataaaacttcaccttcacccggtcaccgacttttttctgataaagccgttttcgcaggtcaacaatatcatttactttgtatccgtcaaattccgtgatgacatccagttccttcagccccgcttttccggcaggtgaaaaggcgtctacacccatcacaaccgctccattggtgacgttcttaggaagctttaatgtttcatcccaatgatagcttgcgatgtcacttagcgatttcatctcaatgccaaggaacgggcgtttgacctttccgtatctctctaaatcctctatcacagggatcacgagcttagacggaatggacaggccaatcccttcaaccgctgactcggcaattttcattgaattgatgccaatgaccttcccatccatatttaacaaagcgccgccgctgttcccagggttaatggccgcatctgtttgcaggacttcagcgttccagtcaggctgtccatcaccgtttgaatctactgggatcgccctctccgtacccgagatgacgccttgtgtgacagagcctgcaaactcaaggcctaacgggttcccgatcgcaataaccggctccccagacttcactttatctgaatttccgaaatcagcgactgctttaatcttatcgcttttcacccgtaaaacggcaaggtccatcagctggtcgctgccgacaagatcagctgatacacgtgagccgtctttcaagctgatttcaatttgggaagcgccttcgatgacatgatggttggtcacgacataagcggaatggtcatttttcttatagatgacgccagagccgctcccagcctcgccgctctctccccaaatatctgatttttggatgttcacaacaccgacaacggcgggcgacatattgctgacaatcttggtgacggcattgttgacactgacattcaccgtcctgattgattcccggccattgttgttttgctgctgatctaaggcgcctgtatccagcccttcatttgaaaggtacggcatgataaacgccattaatacggcaccgacaatcacgccaatcagactcgaaagaaaatatccttttttgcttctctttggctgttcaggagtagtatgttcttcctcacgttcgtaatccaccatattccatcctttccaagaacgttaatatggttatattgtgggttagaaactcctagaatagtcatgatttacatagaaaaattatacagcgcaaagcggagtggccttcttcggatcggtgtcgtataagtcaaatgtctcacccgtcacaaatcctttagaagccaatgtctgctgcacagacattcttgccagctccttcatgttgttgtcctggctcaaatgcgccaggtaaatacgagacgtctcatcgccaatgacatccgtcatcgccaaggcagcatcttcatttgacacgtgcccgacgtcacttaaaatccgccgcttaatgctccatgggtatcttcccatttgcagcataccgacatcgtgattgctttcaaacacaaatacattcgctgaacggataatgcctttcatccggtcgctgacatatcccgtatctgtcattaacgcgagctttcggccgctataatggaatacataaaacatcggttccgccgcatcgtgggaaacgccaaacgattcaacatcaagtccgccgaacgacttcaccgtctccattggaaatacaaacttttgatcggtgtcaattttgccgatttgattctccatcgctttccaagtcttctcattcgcatagatcggaagcttgtactttctggcgacgacaccaaggcccttaatatggtcactatgctcatgcgtcacaaaaatgccgtctacatcatccagcttacgcccgatctgcgccatcagcccatccatggcttttccgctcaaaccggcgtccactaaaaatgcgtgatcctctgtttcgaggtaaaacgcatttcccgtactcccgctcgcaagtacgctaaattgcaagctcatgtttgtctcactccattattttcattgatctgtatctaaaatcgtactctccaaagcattcacagtaaaatactcttgtactgtctttttctcaccgttcacttttttctcgtactcgaccgtaattctccataccggcgccagcacctgcgtacttgtcagcggatattgtgctacatagccgaatttacagctcttcacagtgctgtattcttttaattgattttgatagtacaatagctcaaccgcatccatttcagtaattaagctttctttctggatttgcttgaaggtctcaagcgtagtctggtcgtatgacacaacctcgtttttaccgtttaagtgcagcaccacttgcccgatcatattagagggattgtcggtcttttggtaaatataatgaccttcgtacgtttggaagaaaataatttctttcttcgatttatcaaccttccaaagcttatatttttcgccatcttgaattttcgaagaaacaagtgcctgagcatcgtcctcgatatccttctttgatagtgcgattggatttgcaaacttcattttcaggctcgttactttatgatcatcactaggcatgtccatcaaaggcttttgatccttcagcgcctcaatttcctccttggagaaagacttttgatttgccgtgatccgatagccttctgttgcttccttattcaagccttcatacgtgatatgatcggccttcatgtcatgctcgacatcatttttaatgacttcatattctttgccggtagcctgccatttttgaaaaaactgatagcctaagaaaatatctaaaatgaggaaggcaacgatgaagattgattttgtcttattccactccactgttagccccctccttcctcaataaatcctttgtaatcggcacaatttttccatttactttcatcgcccaaaccggttccagttcaacgagaggatcatcgttggttgatgttgataccaattgataagcaaggaagatctgatcaattttgtccgtatcataagcggtttgtttcgaaagcagcatcttcacttcgctgccgcccatgagctctgtttcacttgttttaatcggattcgttccgagactgtaattcggccgcttatagctgagaatatcatcattcgcccattgcaccgtaatcgccgatgtcgccccgaaaggtttggcggtgctgttaatgaccgggatctgatccataaaaatatagaagctcaactgctggctgtcattgatattgaaaaattgatagtgatccgtccagcttccggtatcctcaaggtatttttggctctttttgattaattcacctgtttgataggatgtgctctgcaccaaattgcgctgctgaaattgcacctgtctctggcttagattcacatctaaccggctgatcccatctgtcagcacatttctgttgttgtaattcgaatcttctcttacaatgctcggatcactaaacaaagcctgcttaaaggtatttgttttaatcgattctgtgacaaattcttttttgtccatcgtaagcggtttgttcggcagcaagaactctttctttgagccaatggagaacaaactgaacgccggcatatttgattgcctgtttttcaagtcgttcataatgttccggtagtttgctgattcaaccgtcacttcaagaatgagctgcttgctgtatgacaccaaatagattttcttgttcgcttttgtttcattgaacgggatcagaatatggtcaaacgaactgtattcaaacgactgattagaccatttaaacagcgtttggaaaatatcaatcgggatcgtatcgctgaattgcaagtcaagcttggcttcagaaccgcctattccataaaaccagcttttgaatccagccttgtcatactgatccgaaatatctttaattcctttcacatcccaatgcggcaagtcagaccaaatttcttcatagagggcattgtcatccactttgtaatgagcgccgtcatcatggataaacatgtcccttggccttaccgtttcagacagcttttgggtggttttttcgattttatgtttcacacgaacagtagactctgttgaggatgagccttcagaaaagtttggctggaacgtccatatcccccatgtaaaaacaagactgatgacgacgagtaccgtaagtaatatcgtttttatattttcacgcttcatcccaatcatcctcttgttcctctttatatggaagagtaaatgtaatcgtcgtgccttttccttctatgctgtccgcccaaatatctccaccgtgcgcctgtaccatttccttggcaatcgccaatcccagaccggtgccgccaagctttctcgttctcgctttatccaccctgtagaagcggtcaaagactttttcgacatcttttttcggaatgccgatcccttcatccttcacgctgatatagagaagttcttcctcttcattgacatcaatcgagaacgtgacatgtccgccttccggtgaatattttaaagcgttagaaataatattatcgagcacctgcgttattttatcctggtcaatctcgacatacagatctctgtccggcagattgcggataaactccacatgctgctcttttgtcatttcaaaacggtcaataataagtgacataaaccggacaatctgaatccattcccggttaaattgataatctttactgtcaaatttcgacagctgaagcagatcattgacaagccggatcatacgctctgtttcattttgcgtcaccattaagaagcgcggagcaatgtctttattttcccacgcgccttcagctaacgcttctaaatagctgcgcattgtcgtaagcggcgtccgcagctcatgtgatacattcgcaacgaattctctgcgttcctgatccattttctcttgttcggttacatcgtaaatgacagcgattaaaccatcaattttgccgtgttccctttgaatcacagagaaattcacgcgaagcaccgttaattcatcatcgcgctcaatttcaagcagcatagaatcctgctgttccactaaatcttcaaaagtataattctcttgaagccccagcaaactcgtaatcggcatttctaaggctgtttcacgtgaaacgttcaacagttccagcgccgggctgtttaagagaataatcgctccgtttcggtttgtggcgataacgccgtctgtcatataagcaatgacagaggctagctttctgcgttctccttcagtcatcgcctgggcatcttcaagctctctcgttaagtggttaaacgttgtggccagctgcccaatttcatcatgtccatactttttaaccttcctcgagaaattccctttcgcaagctccatcgcctgctttcgcatatctgaaagcgggtgggtaatggttcttgccagaaaaataccgagaagagccgtcaaaacaagtgccaaacctgtgccggacgccagtatcgtgttgatcgtcttcatttgattaaagacatcttccatactcgcgacaacgtagatcgcgcccacaacctcttggttttcagtcatgacgggcttcgcggaaataagaactctgattttgcttttcgggtcataatattttcttaaatacgactgtttggtagaaaagattcttttgaaaatcagatcggtcgtttgtttcccagccacttcctcaccgtacggctttgaagaaccgaccacttcatagcttttatctacaaagctaatttcccgaacctcatcacttttcgtgaagtcattcaaaatacggctgacgtcatcctttatgacggtactgtcgttatcgctcttatattcttgttcgatataataagaaaggttgtcgattcgctgattcagcgattgttcataagagctgatcagcgacttctctacctgattgacaaaatacacaccaatgatttgcatggcaatgataatcaaaagcacataaatcaaggtaatcttaaattggatcgaccgaaaaaaaccaaccttattcatatgggcattagtcctgttctgggtttctcaagtaataacctacaccacggcgtgtgacgatccaatttggatggctcgggttgtcctcgattttttcacgaagccggcggactgttacgtcaaccgttctgacatcgccgaagtaatcatagccccaaacggtttgaagcaaatgttcacgggtcatcacttgtccgatatgttttgctaaataatgaagcaattcgaactcacgatgagtcaattcgattgtttcgtctcgttttgatacaacgtacgcgtcagggaagatgacgagagagccgatatgaatctcgttagaggaaggctcttcctccgcaggcgctgttgtcagctggcggcgcaggttcgcttttacacgcgccaagagctcgcgtgtgctgaatggttttgtgacatagtcatcagcaccgatttcaagcccgataaccttgtcaatttctgaatccttagccgtcagcataatgattggcatatcgtatttctttctgacttcgcggcatacttcaacgccgtctttatttgggagcataatatctaaaagaattaaatcaggctgaagctcttctaccatttcaacggcttcgtttccgtcgtgggcacagtgcacttcatagccttcttttcttaagttaaattccaatatatctgcaatcggtttttcatcatctactacaaggatctttttatccatcattttgattttcctcctgccgaatgacttcatttcatctatataacattcgtttcatcacttatggcccatgtaaagaatgggtccttgtctattataacggtttaaggtcaaaagataaaaaaaataaaggtttagaaaaaaaacacatgtttcacctttatcgccagttgtttatctattgtcatgctggtcaactttttttaaaaaagataactttattgaaacctcccctcaccggagtgcgtctttatcaatgacgtcttcttctttgaaccggccgcagggccggttctccctttttcttctattataacactcctcatgtttgcctttttcctaaaagaaaaaacgcacctacgattgcagatgcgtttggtaagtggctcgggacggaatcgaaccgccgacacacggattttcagtccgttgctctaccaactgagctaccgagccaaatgttttatttttctctactaagtaaagtaaaatggcggtccggacgggactcgaacccgcgacctcctgcgtgacaggcaggcattctaaccaactgaactaccggaccttacagtaattgcccggagagctgtcgtgtcagctctcacagacaaataaggaatttagcaataacgctaaagtaaatcaatgacccgtacgggattcgaacccgtgttaccgccgtgaaagggcggtgtcttaaccgcttgaccaacgggccttcacgaaatggtgagccatgaaggactcgaaccttcgaccctctgattaaaagtcagatgctctaccaactgagctaatggctcttaaagatgtcggaatttctatagagcaaacgacttaaatctagttctcatcttgtactctattgaagcagtttccgtaacaacgagatttataatatcacgaacaaatagaagtggcaataacttttttggttttttttcatatttttttctcagaccaacttatatgcggctttcaaacaaaaaacaagccccttaaataggggcttgcagacatattctatttagttcgcacggtacacactgcgaaggacatttgtttgtgagcggtctggaccgacagagaaaatagaaagcggaatgcctgtcagctgagacacacgctcaagataatggcgcgcattttccggaagctcgctcaagctcttcgcacctgtaatatcctcagtccagcccggcatttcttcatataccggctcacattcagcaagtgccttaagacttgctgggaattcttcaatgatttcgcctttgtagcggtacgccacacagattttcaacgtttcaattcctgctaggacgtcaattgagttcagagaaagatctgtaattccgctcacacggcgggcgtggcggacaacaacgctgtcaaaccagccgacacggcgcgggcggcctgttgttgttccatattcgcgtccgacttcacggatttgatcgccgatttcatctttcagctcagtcggaaaaggaccgtcgccgacacgagtcgtatatgcttttgatacaccgacaacgtgcttgattttggtcgggccgacaccagaaccgatcgtgacaccgccggcaaccgggttagatgacgtaacaaacgggtatgttccttggtcgatatcgagcataaccccttgtgcgccttcaaataatacacggcgcccttcatcaagagcatcgtttaagacaacagatgtatcgcaaacatactttttaatctgctgtccgtactcataatattcgtctaagatatcctcaagtttaaacccttctgtctcgtacattttctcgagaagacggtttttttcttcaagattgcgctcaagcttttccgcaaacgcgtcacggtctaacagatccgcgatgcgaattccgatgcgggctgctttatccatgtaagcagggccgattccttttttcgttgtgccgatcttgttagcccctttacgctcttcttccacttcatccaatttcaaatgatacggcagaatgacgtgagctctgttgctgattctcaggttatctgtactcacgttgcgctcatgaagatacgcaagctctgtgactaatgctttcggatctacaaccattccgtttccgattacacacgttttatccttatagaaaattccagacgggattaagtgaagcttatatgtgattccgtcaaacttgattgtatgccctgcgttatttccgccttgataacgggcgatcacttctgcattttctgataggaaatctgtaattttaccttttccttcatcgccccattgcgtacctactacaactactgaagacatgtccgtgcacctccgttaacctttcaaaacgattctattcaaacaaatcaagtttatcagtgaagaaacagaaagtcaattgtaaatccgaacattaatttattgtaaatctatattcgttcgcttccattcgttttataagcgttttctcactgctttgtcataaaaagcttgcgaaactttcatcctttagcataagaaagaatcacttgcctgatatcccttttgaattcataaaaacgatccgccagccgtccgggtcctctatcgtcacgcccccattgctccagtacgggttctctgattcgacctcttgatagcccatgtgctttagctttgaagtgatcgctgccagttcaactgcattcggcacataaaaaacaagaaggctgtcgggatggggaacgggggcagtgcttcccccttcatactgggtgaattccaaatgataatcggcatgaggaaggccgaacatgacaccgtcatacccgttatgctgtgaaaattctcctattcgtttcaaacacagtccctcttcgtaaaaacgaataatctcatcaagctggcccgtaggacgcgcaattcggatttgtgctgcttgaaaagacgaaaaacgttttcccatattgttaccatctcctttttgcaccattttattaaaacgctttcaatttttcatccgctgagcgaacgtcatttcttccatctttcgaatgaaaaaaaccccaagagcagctcttggggcttatgcgccgggcggaacgcctgcgtcatcaaaacgccgttccaggttgacgaatttgttgtattcttttacgaacgcaagagacacggttcctaccgggccgttacgctgtttggcgataataatttcgataatatttttattctcggtttctttgtcatagtagtcatcacgataaaggaacgcgacaatatccgcgtcctgctcgatacttcctgattcccggatatcagacatcatcggacgtttatcctgacgctgctcaacacccctggaaagctgagaaagcgcgataacagggacttgcagctccctcgcaatcgacttcagttcacgggaaatttcagatacttcctgctgacggttgtcctttgaacgaccgcttccctgaatcaattgcaggtaatcgatcaaaatcatgcccagcccgctttcctgcttcaagcggcggcacttggcacggatttcactcactcgaatacccggtgtatcatcgatgtaaatcccgctgttcgataggcttcccattgccatcgtcagcttgccccaatcctcttcggtcaggttacctgtacggagattctgggcattgatatttccctcggcacagagcatacgcataacgagctgctcggcacccatctcaagactgaaaatcgctacgctctcatcggtcttcgtcgccacgttttgtgcgatgttcagggcaaaggctgttttccctactgaaggacgggcagccacaatgatcaagtcgttgcgctggaaacccgcagtcatccggtcaagctccgtaaaccctgttggaattcccgtgatatcaccttttcgattgtgaagctgttcgatattatcataggtctggacaaggacgtccttaatattttggaaggcactcgtgtttttgcgctgtgccacttccataatcgttttttccgcttcactgagtaaatcctcgacctcatcctcacgggtatacccgtcttgagcaatcgttgtcgcagttctgattaatcggcgaagaatcgatttttcctcaacgattttcgcgtaatattctatgttagccgctgtcggcaccgagtttgcgatatctgtcaaatatgaaataccgcctacttcttccagcaggtctgtgttcgcaagctctgatgtaactgtcaccagatcaaccggttcacctcggtcaccgagcaccagcatcgcattatagattttttggtgggacattctatagaaatcatctggaatcaatacttctgaagccagtgttaaagcagacggctgtaaaaaaatagcgcctaacacggcttgttcggcttctatattttgcggaggaagccggtcattcagaaggtctgtcatgctaagcaccgtcctctcattaaaaaatctccaacctccattctaccatttctacagaaaaaaaatagaaaaattgtctgtttcctgtttttttcagttagcagattggatcgtttcggacagtaacaaggcgggaaaaatgcaataaaacataagggaggaatgaaagatgataaagaaatatgcgattacacctaatgttgatgcggacggctggtttattgaggtggagaatgtagcgccgacagctttgtatacgtctaaagacgccgctattgaaaaggccaaacaggtggctaaggaaaacagtccgtctaagcttgtaatttatgaccagtttaaaaatgtggaagaagaacactcattttaatgaatgaaagccttcgctgcagcgagggttttttagcggttatcggtttatttcatccattggatgcctatgtgcatcatcaaatctgccgctttttgatacagatcccactccccgatcgaagcaaatttccccatcagctcctgaagctttaacctcattgctatatattcttcgaaagtgacagctttttcagtgtctatttggtgttccttcagcatttgttttaataaggataacggtgcgtgcataagaaccctccttacctcttttataacggtcattttccgattgctctattcctttgtgacatcttcttacatttcacatctgattcttgtacaatggacagaagagaggagggatcttttgtgagacctttgcaaatttctgccgaaactgcacaaaagcttgcagagtccttgaatctgccgcttgaacagatcatgcatatgcctcagcatattctgcttgccaaaatggctgaactgcaaaaagaggacaaatcatagccttcattcacatacttgcttacctgtttcgggataatatcatgtatatgttagaaaagaggagtaactgctttgccacatccacataataaaaaaatccaatcattttggctgatcaccggcattatctttatcgcctttaacttacggcccgcgatcacttcagtcggtccggtcatcagctctatccgggcagagctgcacatgtccaatggggcagccggttttttgaccgcactgccgctgctttcgtttgcagttctttctccgcttgcacctaagcttggacagcgcctcggtaatgagcgaactttatggctaggtctcgtgatactgctgatcggtgttctgactcgttctaccggctatactgccgctttgtttttcggaacagcacttatcggcgtcgggattgcgattggtaacgtacttttgccaagcttaatcaaacataaataccctgaaaagccagggatcatgatcagcctgtatacgacatcaatgaatatattcgcagctttagcatcgggtgtcagcgttcctttagcgacccagatgaatggcggatggaaacaagcctttctcttatggggcgggctggctttacttgcattgctaatctggatacctcagctgcgccatcgagatacggcaaaccagacaatgaagctgcaatccagttccatttgggcttccaaaatggcatggtatgtcaccatctttatgggcctgcaatcgtttttattttacagcagcatcgcttggtttcctgaaattctccgttcacacgggattgatacggcaacagccggatggatggtatcactcatgcaatttgcgagtctgccttccacttttctgacgccagttttagctgaccgtgtgaaacagcagcgcggtatcgttgcggcgctggcctcagtttatctgatcggcctttgcggattattagcgggcggaagccatacattgcttgccatctggatgatcattatcggtatcggacaaggctccagcattagtctggcccttactttgattggtctccgcagtgaaaatgcccaacaggccgctgcgctgtcaggcatgtctcagtcattcggctacctgctggcagcagtcgggccaatctttgtcggctatctctttgaccagacgcattcttggacgatgccgattgtgcttctcattgctgccctgatcgtaatgggagcagccggacagggagccggacgagatcgatacattttccagtcagaaaaacaaagaaattcagcataaagcggggaagatatctccgcttttttctttgaatatttatggtttattcataagtttttcatatttgttttttacaatgagacaccataaagaggtgaaaaacgatgaaaaccaaacgattcgacgcagcccttattcttattttgctagcagcagcttttttgaatacgtatcacatttggcaggatgatacagcaaaccagtactatttggcggctgtaaaaagcatgacgcaaagcttccataactttttttatgcgtcatttgacccttctggatttgtgacagtagataagcctcctgtcgtgttatggattcaaacgattttcgcactgattttcggtgttcacacgtggagtgtcatcattccccaggctcttgccggagttggatctgtcttccttctctacagaatggttaagccgacttttggagttggagcggcccgcattgccgcacttgtcatggcactgacccctatcgcagtagctgtcagccggacaaacaatatcgacagcatgcttgtttttaccttattgctcggttcaacttgtctgcttagggcagtaaaacaaggcaagctggtttggctgctgacggcatttgccctgattgggctcgcctttaatatgaagatgatgcaagcgtttatggtattgcctgcatttgtgttattctacctgattgcatctcgggtttctctgaagaaaaaaatcgggtccctgcttctgtctcttgtccttctgacaggcctttcactctcatgggcgattgcagtggattcagcctcttcctcaagccggccttatgtaggaagcagccagactaactcagtgctagaactggcctttggctacaacggcacagagcgtctgtttgggcaaactacgggccttgcaaagggtgatatgaatgctgctggcggagggaacatgcagaatcaagacaacatgcaagcgccaaatggcaacggttcatctttttctcagaacggtaatcaatcattcggaaaccattcacaggcgcctcagccgcctaacggacaaaccggcgctctcaatggaggcggaggcacacctcccacaggtggcaacggacctggaaatggagggcctggcggcggaggcggaaaaagcgtgaatatgttcggcaccggtgatcctggaccgcttcgtctcttccaatcagcactttccggccaaatcagctggatgcttccattctcattgatcggattactgggcgcaatcatcagctggtaccgtgatcgccgcggacatgctgctaaaatgaaagaaacgctattctgggcggcttggcttgttcccgtggctggtttcttcagcatcgcaggattcttccaccagtattatttgattatgctggcaccgccgattgccgccctttctggtatcggatggtatacgatgcaccgcttatacaaaaataataaagactggtccagctatcttctgccggcagccgtcttgatcacagccgtgtttcaggtgtatattctgagcgcttatacaagccaaatcggcagtgtatggatgtatgtcctggggctcttaggactgggcatcacccttgcacttctgatgcttaaacgcagccatccgttcagtaagctgctgaccatcatcagcttgtgcgttctgcttctcacaccagtttactggtcagcaacgccgcttctatacggtggcaacagcgtccttcctgaatccggcccgcagctcaaaggctcagcaaacggcgggaacatgttctcttcagaggtcgacagcgggctcctgtcctatctgagaaaacacaataccggcgaagagtatttatttgctactttgacaaccgtaacagctgcgccatacatcatttacgaaaatgaatctgttatggcaatgggcgggtttaacggcacggatcccattctgactgtgtcggaactgaaaaaactgatcaaagaaggcaaagtgaaatacttccttctgtcagaaaacaactcaggcaacagcgaacttgtttcctggattaagaaaaacggaaaagaaataacatctgacgagtacagcggttcctccagcagcacaaacagcgtgcagggaatgcgaagaggacctggcggagaaagccagcaaactctttatctcgtggaataaaaaaagaggcttggatgaatccaagcctcttttctattaagcttcttcttttacatgtacctttaacacagcctgcacttcaggatgcagcttcacaggcacgtttgtatatcctaatgcacgaatgccgtccggcagttcaagcttccgcttatctactttaatgttatggtctttttggagctgttcagtgatttgcttgcttgtcactgaaccaaataaacggccgccctcacctgattttgcgctaagctcaacagtcagtttttctaatgtctctttcaagctcttagcctgctcaagctcagcaatggcttcttttttctctttctgcttttgtccgtttaacgcgctgatgtttgacgcgttcgcttcaaccgcgaggccttttttaattagaaagttatgcgcataaccgtctgctacgtttttgacttcgcctttttttccttttccttttacatcttgtaagaaaataaccttcatctctgtacgcctccctcaaaatactcatctatggcgtgcttcagccgttccagcgcttcagaaactgaaatgccggacaactgagtcgccgcatttgttaaatgccctccgccttccagggcctccatgatgatctgaacatttacctcgccaagcgaccgagcactgatacaaaccgtttgttcatcccgtctcgccaccgcaaatgaagcctcaacctcactcatcgatagcagcgaatcggcagcctgcgcaatcagcacttgatcgaagtattcctcttcattttcaggaagagaagcaatcgcaatgttatctttatagaggaccgtatgctggatcagcttcgcccgtttaatataggaatcaacggtttctttcagaaacttctgcaccagcaccgtgtcggcgccttttgcccttaaataagaagccgcatcgaaagtccgcgagcccgtgcggagagaaaagctctttgtatccactattataccagctaatagggctgttgcttcaatcatattgatttttaagcgcttcggctgatattcaagcagctctgtcaccaattccgctgtggaagaagcgtatggttccatataaacgagcagcggatctctgataaactcctcacctcttcggtgatggtcgatgaccacgatatgttcaattttattgaccagccgttcctccatgacgagtgacggcttatgtgtatcaacgatcacaagcagtgtgtcatcattggaaatctccattgcttcttcaggcgtaataaatcttgaccacagttcttcatattttttgatttccccaatcaaacgctgcacacttgatccgatttggtttgggtcaatcacgataaaaccatctttgttatttgcctgagccacctttaaaatcccgatcgctgcgccgatagaatccatgtcggggaatttatgccccatgataatcacattgctgctttcggtgacgatttcctttaaggcgtgagaaatcacgcgggcccgcacccttgttcgtttctccattgggtttgttttaccgccgtaaaacttcaccttgccgtttggcagcttaatggctacctggtctccgccgcgtcccagtgctaagtccaagctggattgcgccaaatcgccaagttctttcagggaagagactgaagccccgacaccgacgcttaacgtcagcgctacaccgtcaaacgaggttttttcccgcacttcatcaagaatcgaaaacttcgaattttcgagttcagttaagatatgttcattaagtacagcaataaagcgttctgaagacgtccttttcaagaagatcccgtactcctgcgcccaagcgttcagcaaagatgtcacctggctgttcatcgtgcttctcgtctggtcatccaatccttgtgtcacatcatcatagttatcaaggaaaatatatgccaggacggttctttcgttttcatatagcttttcaatctggatttgttctgttacatcaaagaaatataagagacgctcatcccgtttgatgacaaccctaaacttgcggtcattcaatgtaaccgtttccgattccacctcttgtttgataagcggcactaccgattcacaagtatcgtaaagtgatctccccactaaagtgctttcattaaaacaagaggaaagaaacggatttgcccattctatataatattggtcattaaaaagcatgattccaatcggcatttccatcaatgcctcttcaccgacttttttcaacctgtaggacaacgtagaaatataagcatcaatctcttgtcgaataagagaatcagcacgcttaataaaaaacaaaataactgccagcagcagcacttcgacggttcctaatatccagttaaaataaaagctgatgaggattgtaataattgacagagcaatcaatgcatagatgggataccgaaacagcggtttttcataaaagcttggcatttctatcactccccaccatgtgagtaaaactcatgttcacttcaccttattccttatatgaaagcccatatctaaaacgcctaaaatgcgaatggccgccatgaagaccggatgcacaaacccaagtatgacagcaatcacagccgcagcctttggatattgtttcttatggcaatagaaaaagataaatgataaaccttggatgaaaatcagaaacccgagtataaactccccatttaaagcgatagagtacagcatttggcctttttctaaaggcaaaaatgaaagcatgacaataatcaaatacagtactacaacactttgcggaaacttcaactctctaaaaggctttagattaggaatatcgggggagaatcgccttaagagcggcttagcgataaggtaactgaggaaagaaaaaataactcctaccatcacaatagctgttggaaaaagatattgaacgatacccaattgttcttccatcagttttaattgcttctcaaactgcccagcattgcccgactgcttcgctacagtttctacaatatcaagagattgccggtattgtgtcattgcctcatcaatgatattgatacccaaaaactgaatgcttatcacaaaatagaagacaatactaagcatataaataagagcgcccgaaataatggcgtgcccgggctctttccttttgaaaaaatgtcccatggcaatgccggcgcaagctgacataaaagctacaataagcccgttaaaggacccgacaataaaaacaaccggaagactgacagcgcccatccatatccctagcttcaatccatgtctgatcgtatacaagatcattggcagcggcagtgcaaataacagaattgttccaatcacaggaacataaacgaccagaagcgtaatgatcgcaaacagactgattaaaatagcaccttccattaaagctctcgtttgtttcacttagtcacctcgtatcatcctgaacatacgaatagaaaagagcagcataaacgactgctcttttgttcatcgctgcaacatgctttgcaccgaatgtttttatatcatctctaaattttacttttatattttaacataagtccaaatcgcaagtaaaatgacgctaatgtttcatgtgaaacatgaaaaaggaaaagacattctttgaaaagaatgcccatcacaattaatgtttatcatccataaagccagaagattccttgtttttctttttcgtttttctgacatacataaaaattaagatcaccagtaaaagggttgttgcttgcagaacgccgctgctaaacaagaaaaagttctttatcatgtcccacattgtgtttcacctctttgtgcatgttctcaacccgtatcctatataaggtgaatttccctttttaaaaacttcaaaacatcatgaacaacattgagcgttgggcatatgctgatatggaatctgatcgataaaggagaattttcacatggatgaacgcagaacattggcttggcatgaaacattagaaatgcacgagctggttgcttttcaatcaaacggactcattaaactgaagaaaatgataagagaagtaaaagaccctcagctcagacagctttataacgtgtctattcagggtgttgagcaaaatttgagagagcttcttccgttctttccacaggctccgcacagagaggatgaggaagaagaacgcgcagataacccattttacagcggtgacctgctcggttttgccaaaacatctgtccgcagctatgccatcgcaattacagaaacagcaacacctcaattaagaaacgtactggtcaaacagctgaatgctgccatccagctgcacgcccaagtttatcgatacatgtatcagcatggatattatccgtcttacaacctttctgaactgttgaaaaacgatgtcagaaacgccaacagagccatttcaatgaaataaaacaagcagcaaaggagttccctttgctgctatttctgctgatccttcactaagccgttcgaacgataagattccagcacgtctctgttggattctccccattctttcatttgcaaaacaatcggttcaagcgtgcgcccaaattccgtcagagagtactctaccttgggcggcacctggtgataaacctcacggtgcacgatgccgtccgcttccagctccctcagctggagagtaagcattctttgagtaatactcgggcagattcgccgaaactcattaaatcgtttcttgccatctatcatgtgataaaaaagaattcctttccactttccgccaatgacatctagagtgaattcaactggacagccttctttgttcgggtatatattctttttttcactcattcttgaccctccaatagtaccttttttgatactacattacattttgcaactaatctacccagtattttacacaccttttctccttagctcaaagaaaatgcttcttattcacatcaatttttaagggtttgcatgattacacctgcagcaagacgtgttaaactatataaagattacactacttaaaaaaggataggagctatcatggaaaagatacttattttcggacaccaaaacccagatacagatacgatttgttctgcgattgcttatgctgatttgaaaaacaaactcggcttcaatgctgagcctgtccgcctcggacaagtcaacggcgaaacacaatacgcgcttgactatttcaaacaagaaagcccgcgtcttgttgaaacagctgcaaacgaagtaaacggcgttatcctggttgaccataacgaacgccagcaaagcatcaaagacattgaagaggttcaggttttagaggttatcgaccatcaccgcatcgctaactttgaaacagctgagccgctttactatcgtgctgagcctgtaggctgtacggctaccatcttaaacaaaatgtacaaagagaataacgtgaaaatcgagaaagaaattgccggccttatgctgtctgcgatcatttctgattccctgttatttaaatctccaacttgcacggaccaagacgtagcagcagcaaaagagcttgcggagatcgctggagtagatgctgaagaatacggcttgaacatgttgaaagcaggcgctgatctaagcaaaaaaacagtggaagagctcatttctcttgatgcgaaagaatttacactcggcagcaagaaagtcgaaatcgcacaagtaaacacagtggacattgaagatgtaaaaaaacgccaagctgaattagaagctgtgatctcaaaagttgtggctgagaagaatcttgatctgttccttctcgttatcacagatatcttagaaaatgattcacttgctcttgcaatcggtaacgaagcagcgaaagtggaaaaagcgttcaacgttacattagaaaacaacacagccctcttaaaaggcgttgtttcccgtaaaaaacaagtcgttcctgtcttaacagacgcaatggctgaataagcaaaaagcatcccgcgtcgggatgctttttcttattcacccagcttctcaatttgtcccatcacatcagtaatttgctttgcgttttggaccaggtctgactgctccaattctttaagcgataccttgccttcctcggcttgtttcaacacatcttcagcgcttttctgcaaggtttcgttatgctcctgaatggttcgatgaatctccgctgcggcatcaggcggcgttaattcattaaaatcagcggcagccttctgaatcgactcaagctgcgcttcaagtttttctttcgcctcggtgtcatttacagctttctcagccaattcaggcgcttcctctgcaaatgtcttcaccttctccacataaccagctgcttcactcgtatagttcaatccgtcgttcacctgatcaagcatgccgcatccgcctgcactcaaaagtcccactccggcaagtactgtcaaaatgatcttcatcttcagccccctcatcgtttctttttcattttttcttttaagatcggaatcaatttctctttcgctaacggcagccctttcctcaccaattcacgcttcagccactttttcagcttagacattctgatgctcctctccctttttgataaaaatgaaaaaactccaccaatttggtgaagttcctgaaacaaaaagaccttcaccaaatcagatttggcaaaggtctcgctaacaatgagattgccagcaaagccgaggacaccttgtcccgtaatgacgactttactgtgaaagctactcccctttggagtgttcatttttattactttcattctaaagcaccgatctgttccagtcaaattcctgccgtttatataaaagcgcgctgtggtatttaaaatttgaatggtttttctatcaggagatcatgctatgacagaggaggttttcatcatgagtcaagagcgcgtgaaacggcctgggcataccagatggtacatatcttcgttacttagcggcattattattcttaattattttgaccgagtggccatctcggtagcggcccctgcgatacaagattcgtttcaccttactgcaactgaactcggcatcgtgttttccatttacacctattcctatacactgatgcagctgcctgtcggaagtttgctggaccgttttggggtcgcatgggtcacgagggttggaatgacaatatggagctttttaacgatccttcttgcttttttgcaaggaaaattgctgttgtatctgttccggtttctcattgggctgacgagcgcctctgcgttccctgctgcctctaaagcaaccgctctctggtttcctccaagtgagcggggattggcaaactcactgttcgattcggccgccaagttttcaaatgtaatcggcgcgccattggtcgcctttcttgtcacaacatttgactggcgtgtcgcttttttgacgattggatgcatcaatgtgctgtttacgatctttttctggcagtattatgaacagcctgaacggcacaaacgcatttctaaaagtgaactaaactatattcaaaaacacaatgccattacaacagagcaaatcccttacaaaacgggcccgcttttaaaaaagcttttcaccaatcgaaaagtatggggcttaatgatcggatttacagggtacgggtatacattcaacctgctgctcacctggcttccgactttctttaaacatacatacggtatggatctcatgtcgtccggtttatttacggcagtgccgtggctgatctcaaccatttccggaattgccgtcggcggctggctcgtcgattattttattaagaaaggctatcctaataccaaggtgtaccgaaccgtaatcatagtcggaatgagctttggctttttctttttaggatccattctgacgaacaatattaccgtagccattatttgcatttccatcggactcgccggaatttccgcaaccgctccggtcggctggtccatctccgcagaactcgcgccgatcggttccgtatccatgctgagctccatggtgaatctcgcaaacaacctgttcggaggcattattgctgcgtcactgacagggtatttgtttgatgtgacaggctcctttaccctcagctttctggtagctggttttgtgctgttgctgggattggttttttatgtgtttgtattaggggatgtaaaacgaattaaactatagaacatgaaaaagagagctgccagttggcagctctccctttacatcaaagaatcggcccgtccccatttaccttctcctcgtcctgttcctctatatcaagccccgaagctagcatttcctgctctatctgttcgagcacctgctcgttttttccttgaagaccaccttcataatgaaaagcatcctgtgtgccgttttcctctattgtcgctaaaatatcgtggatatcattatggtctcctgaaatggagccgaatccctggttttgttttttataattcacaaaaccgctggggaggttgtttccgaggtttacacatgatgcgctccgagtagtaattcatcagtgtatcaaaatcttcattttggattgccacatcacatgcagagatgatgtctttcaattgctgttccaaatgaattcccctaatcatcatgattggatatattatacaatgtttgacacgtagggatccttttcatttttgtttttacggtttcgctggtccatttccgcagagctggcgccgatcggttccgtatccatgctgagctccatggtaaatctggcaaacaacctgttcgaaggcattattgcggcttcattgacggggtattttgtttgatgtgacaaggctcctttacgctcagctttctggtagccagttttgttctgctgcttggattggttttttacgtgtttgtcttaggggatgtaaaacgaattaagcgggaataaagagtgcttgtagagaaaacgttgttctttctacaagctttttagttttgtgctgtttttcaagatattcagctgtcataaaaagaaaatgagctcccacataccggctaggtatgtggcgttcttcttcatgttctggcatgcagctgtgaggaggatttgtttgctcaccccctgaacctgcgatagctaagcccgtgcagttgttttgaacctacaaagcttcgttctattttttcttttctttttttagagatttcctgaaatagaaaagcaatcttttctaaccttttctttatggttttgccatacataccgagtaacgactttctggcgtttcgttgattttgtgtaatattctcaaacatatttcaggatttgatttatatgaccgatagtctttgcgatcaattgttgagtacgtaagtgtatgctgattcaacaaatgtatctgtattgttcactttataatgaaatttccattttggaagcaaacccctgactgggtgataacgtctatgtgcgatggcaccaaaaacttggaggtcaaatagtcctttagagatgagagttgttaagtagccggaatctagagcgacggcttctacttgaaaatcaaatcatgcaatttagtgatccaatcggtcaaggtagggcttggaacagaatcatggacttttctggagttgcaaactattaatcgtcctcattaaatttataataaaaatattctcaattgagcaaatcgcccaccctttttcctttataacataaaatccaatactatcaataaaattctttacaggttattacagttaagatataatatagttaatcttttacgtaaaaggaggtttttattacttgtgttgaagttttaaataggagtaactccatctccccattacggtcttcatttaatttcatcctgagttttatttagttagatataaaaacgaaaatttcacattatttttaactaaccgatagtataaaatatatattgaaaggattgtaaaattatgaataaattcctgaagagcaatttccgtttccttcttgcggctgctttaggcatatcattacttgctagtagtaattttataaaagccagcaatgataactataaattccatttacttgtaccttatggctatggtaatgcctattcaaatgatgcatttagacagaccactcatacagataatccttggaaagtaaatttacagaaatcggcagaaggtaaaggtacaatcatgacattttggttgattaacacagggaatagtaaaattccaaaagcttctaaaatacataacgtaaaacaaggaagcggagctcattattatcatgcaaatagccagggaagccatacatatgtagccttagcagttgaaaacaacaattacagtgcaagttcttatggtatagatggtgtatgggatgaagaaacttggtaaacaagaaccttctaaaaacgttggcaccttttagccacgcgaaaaaatttagaatgataatctttttataagattatcatttttatttattctattaagaattgagtgagaacatggaaagtcatatttatcgcattatcaaaaataaattaactataataatatttactataatcatattaattccttgtgttgatatatcactattgttaatgactaacacagaataccatcctgcatatgcgtttttcctttctggcacttccgtagggcatgcttcacaaatgatcctattatggtttcttccgctttattttttgttactatgtgctgacgattctatacaagattataaaacaggatatcattacattcttataagcaaagttggcagaaaaaaatattgtttggaaaaaatatttacctcttttatcatttcatttttgacaatgtttttgtcactaatattaaactttttattggttcaggttttcttttttaaaggtacatttaaaaatgacttagaccaaattaaattccctgataacagcctttatacttttagtatggcccatccttatatagcaattgtgttattttctattatttgttgtattatgtctggatttgttggagcacttggttcaagcctcagtttactttttcgtgataagaagtatgcctacccagcaagtttttttatttggttcgtacttatactaaaaaacaaatcattaatgtttttattccaaccgtttacagaatacggttataatgtacttctccctatcctatgtttgtctatctttatttttctaataataatttctagtattgttttatatgaggcaaaatacaatgaaaattaaaagactactattaattttatgtttactactatttttagttactttatggttcaaccagaaccacacttatcttggaaagaattctatcgcgtcattactatatatgaataatagtacattcggatatagttcaatatttgcatataccttgttttatattgtcccgtttcttatgttacttagtaacttttttcattcagaaaacccctacaaagtaatgaggatggttaagcgtaaaaattactacaagtctaaaattatggagattgggtttgtttctttacttttttcttcaatacatactgttattaatattacgtgtacacatattttctttagtaaaaacttgttggtcgaagcaaactttttatcaatttgtttattaaacatgattagtttagtgtttttctacttatcagtaggtattatgtttagacttacatacgatctgtttaattcagtagcattagcaatttttattgtgtatataattttagatagcttgtatttcggcgttaaattattacttcctaatggatattgggaaccctttagagacttggctatattcacaaatatgctcaatagatattggtcaacttcaaatcttataatagtttatattagacagataataatagtttttattttttatttagttggatcttcaatttttttgaataaggattataaaaaatgaggattaaaggctttttcataactttagttgcgataatatttcaggcgtcattatcgagttataataataataaaaatgtctttccttttttagatggcataccaataagcacctcgggtcattatgagtatcaaaatattttattgtggtttgtacctattgtttccctaagtttttgtttctctgggagtattagagatacatacatttcgtatgagcaattaaagttagtaagagaacatagtagagttaaatgggtaacatctcaattcttaataattacagttgtacttttaatctttactttatctcagattgctatattttatatttattcacttgtatctcttcataaccttgatattaattccgttatcaataaaagatttgttatgatgacactcatgtattatctaaccttacttaacttatttagttttcaattatttatggagctttattataaatctcaaatagcacaattaaatataagcgtttatattattttttcgttaattttagcaaagaagttagtgcaattaaattctccgaaagttattcactactttttaattccaaactacagtaatggattaagaactgggttaagctattattcccaatctggaactgctattattgaaccattattaggtttgtttattataatcattttacagatttcaatagttatattatctgtcttaaagttcaaaaaaatagatatgctaaaaagtgagggcttacaatgattgaggtattaaacctaacaaaaaaaattaaaaagactacagttttagataatatctcttatacatttgaaaaaggaacaatttatggactatttgggagtaatggttctggaaagaccatgctacttcgtgcattatccgggttaatagtccctactgaagggagtataactattaaaggtgaacaattacataaagatatctcttttcctaaaagtgtaggattaattatagaaaatatgcagttacttcctcagtatgatgcttttactaaccttaaaattttgtcaaaaattaaaaagatcgcatcagataatgatatattagattctattagtagagttggtttggaaaattttaatagtgtaaaggttagtaaattctcgttaggaatgaaacaacgattaaatattgcacaggctatttttgaaaaacctgatatattgctacttgatgaaccaacaaatgcgattgatgaaaaaggagttgcatttgttcatgacattcttttacaagagaaaaaaaggggagctaccattattattactagtcatcacaaggaagatattatatctttatgtgacattgcattagaaatgaatcatggacgtctagaaacttcagaaaaagtaatatataagaaagatagttagtttaaactggctatttcttatccaatgatagactgcagacaagttcaactgctgtaatgctagaaaatccaatgaaatgctgataattgcgaagagatatgatcagtcagaaaacaaatcttaaaaagaaaaagtaaattcatcaatatttctaataaacctggcaaacaacctgttcggaggcattatagctacttcactgacgggatatttatttgatgtgacaggctccttacgctcagctttctggtgccggttttgtgttgttgctgggattggttttttatgtgtttgtattaggggatgtaaaacgaattaaactggaataaagagtgcttgctgaaaagcactctttttctgcatcgaaagaatacttaagataagtcactcccaaaaatcgtaacagtctgacggttaaacataaacctctgcccgttccattttaatacggtttgaacatatcccaatgagtcggcgttataccttcccgctatccgctggtacgccaataattcgtatacgccgtctctgtcaaaatcaaccggatacaagcccgataaaggattcacccatccttctatcggcatttttaacacaccttggctgttataaatctcattcaaatattccctgcccttgtaagtaaggtcgaggatatacgtttcgttttgctgatgactgataacgctcgctttatattgattttgatacctcacactgtactttaattcatcattcaatacatctgaattgaaaattcgccggaactgcctgtttagataggcaaacacatatgcataaatagcaccgccgcttccccctgtgtccattactactgccacatcctcaatcttgtcgcctgtcatatcccccagaaaaagtgacggattgtatcccatattgttttgaagctgaatccgctgctcctgatgggttctgccatcacggatcaccaatgtgatatttctccataacgggctgccgggcatttgatttccagttagaaagacctcgtcaataacgccgtctcccgttacatcgccgcgggtagatacaatgattgcacgtgaggagacaggctgccgaaatacgtatggatgttgaacaagtcctctgccttcataaaaccaataaggagccattctgatgtcatacacattcaattgtgtcaccttccctaatcagctgaatgaatcattatatgcaggaatggcacatcaaagacatatcttacacaccaattaaatccgtaccatatgaattatcaattacacaaagccactcgccttgcgcattctttttaaatacataggtcgcccttctttccatcgcatactcggagtcctttttatccgaatcaagcagtgtctgagaaagaacgagtaccgtgtcacctgcttccaacaggatcattttcccttgtgtcgggacaatatgatgattgaaatagttcgcaatcgtgataaacgcttttttgatttcttccttgcctcgcgcgatcatgcccggcttcacaactaaaacggcatcttccgaataataattcatcagtgtatcaaaatcttcattttggattgccaaatcacacgcagagatgatgtctttcaattgctgttccaaatgaattcccccaatcatcatgattggatatattatacatcgctagaccactgaaaccttgaaaacaaaatgaaaagtatccttttttcctatataatcaaatagatatatttaacaaagtacccaagtgaaggggtgaacattattgtctgcggaagtaacgttacatgacaatatacattatgatttaagtgcggattgccagcactgttttggcctgtgctgtgtcgccttgccttatgcgaagtcggcagattttgcttttgataaagacgggggcacgccttgccgcaacttacaatcaaactatcaatgttctatacataaagatctcagagaaaaaggatttcgaggctgctctgcatatgaatgctttggcgccggccaaaaagtatcccaaatcacttatgagggaaaggattggcgaaacagccccgaaacggccaaccagatgtttgacgtttttcctatcatgcagcagctgcacgaaatgctctggtatttacatgaagctctttctatagatatagccaagccgattcattctgaactgagaaccactttcgaaaaaatagaaaggctcaccagactcagcaaagaacgcttgctgacactgcaggtggacgagcatcgagctgaggtcaatgaatggctgttaaaaacaagtgaactggtgcgtgcccaagcccgccatccaaaactcccgaaaaaggtcagccggggaagtgtcctgatcggcgcgaaactgaaagggcttgatctgcgaggagcaaatctaagaggggcgctgctcatagccgccgatctgagaaatgccgatttgagaatgacagactttatcggtgcagatatgagagacgctgatctcagcggcgccgacctgaccgggagcatctttttgacacaggcacaggtgaacgccgccaacggcgattcgaatacaaagctgccgctgtctgtacgaacccctgcccattggaaataaaaaaggacccgctaacggtccttttttactgatcaattcaatcctttttcgttcctcttatccggcattttcacacttcttgccaagtatcccgacagccataacgcaaccagcagcatgaaggtgatcataccgacgacgcccagccagtgaaaaccagaccagaatagccctccgattgttccgaaaacacttgaaccggcgtaataaaagaacaaatacagcgatgaagcctgtgctttgttgtgaagggctctcctgcccacccagctgctggcaactgaatgccctccgaaaaaaccgaatgtaaagagggcaatccccagaattttcactgccagcatattgtttatcgtaaataacgcacctgcaatgacgatgaaaatattcatcaccaatattttcggatagccataccgatcaaccattcttccaatgaaagacgagctgaaaatgcctacaatcatcacaataaagatccagctggaaaatgctttattaagcgaatacggcgggcccaacagcacatacacaatgtaattaaacaaggcaacattgcttccaagcagcaaaaaaccaatgagaaacaagctgaatagtttacggtccctcaagtggccgatcagagacattcccaatttcccgagcttcaattttcttggcgtaaaatgcctggatggcggcaaatttataaaaaatataacactagcaatcaaactaatgacaccaattgtccccatcgccatatgccaattcaagtactcgctcaggagcccggaaacgatccttccgaaaacggcgccgattgcatttccgctgatatatagccccatcgctgatccaagacttccgggttcaatttcttccccaagataagccatcgcaatcgacggaaggcctgcgagcgcaacgccttgaatggttctcaatacgagcagtgtatgaaagctcggactaaaggccgatgccagacagagaaccgatgcggccagcatggaaatacccataataggcttgcgtccccacacctcggataatgaaccaaagacaagcatgctcacagctaacagcattgtggtaacagataaagaaagactcgccgcagtaggcgttacatgaaattcccgcgtgaattcctccatgagcggctgtacgcaatatagaatcgcaaatgtattgaaacccgcagcgaagaaagcaaacgtaatttttcgaaaaaccggtgtgccttttcgaatgtatgtcatcgggactttatcggtccctcatcatgttgtggagcactgccattcataaacaatcatcctttatttcttacgaattcaaacatcctcgagtctgtttatattattatcttagcaccgttgatatatgttgtataatgcatataaaatatccttttcatgcttatatgtaataaggagagatgataattggaatgggaacaacttgaatattttcaaacactggcccggatgcagcacgtcacgaaagccgcaaaaagcctctccatcacacagcctgcactttcacgctctatcgccaggctggaaaatcatttgggcgtcccgctatttgacaggcaaggacgatccatcagcttaaatcaatacggacacatttttttacgacgggttcaggcgatgatgaaggagtataccgaaggaaaagaagaaatccaagccttattaaagccagaccaaggcgtagtctctctcggttttttacatacattaggcaccacgctcgtgcccgatctcatcggctcctttcagcaggaataccccaacatttccttccagctgaagcaaaaccactcttattggctgcttgaacgattaaaatccggagatctggacctctgtctcctcgcttcgattaagcctgaaaatccgatccaatggatcaagctgtggagtgaagaactctttgtatttgtgccaaatgatcacccattagccagtcgcgaaagcattaccctgaatgagattgccggggagcgttttattttattgaaaaagggctatgcgcttcggatgacggtcgatgagctgtttgagaaggccaatatacagccgaacattatgtttgaaggagaagaagcaactactgccgcaggttttgtggcagccggtctgggcatatctattctcccagacctgaaaggcttagaccaaagcaaaatcaccaaaatccgcgtcagctggccggaatgtcagcgtgtcataggaattgcctggataaaaggcaggtttttatcaccggttgctgagacctttaaacaatatgtgatcagccatttttctgagtaggaaggattcaagcatgaatgtcaaaaaaatcacgtcagaacaggatttacatacagcgtttgaaatcagaaaggcagtatttgtagaggaacaaggctgtcccatttcggatgaattcgatgagttcgatacactccacggtgactgccagcacatcctggcttatcatcagaatgtacctgttggcactgcacgtgtccgtatcgttggccacacggggaaactggaacgaatctgcattctgaagtcttaccgcaaattcggtttgggaaaagtgatcgtcgatgcattagaacgtattgtaaaagaacaaggcatttctgccttcaaactgcacggccagacacaggcggcaggcttttatgaaaagctcggctatcggactgcatcagaagaatttatgctggacggcattccgcatgtgctgatgacaaaacaagacgattctgcgctatagattgttcacaaatttgtcacttatgagcatgaacggttcattggtatactaatcaccgattatggagagaaggaatgattgtatgccagcaaataaaaaagaaggccttatatttggcgtgatgatgtgctttggaatggtttgcgtcatgtcgatttacaatgccatcatcaaccgagccatctacgatttttcactgatgaccgtttttgaaatggtcatcggttttatgatcgccctcctgttagatttactgttagtgggccccctcgccaagaagattgcattccgcatgccgttcgacaagactaaaaaaatttatgtcatccttgccatgtcaacttgtatggtgattggcatggtactttgtatgtctgtgttcggtttagtgacagcggttctagcaaatgggctgaacggggacagcctcttcagtgcttatcttatgattgtgttgaaaaatttcatcctggcctatccgttgcaattactgattatgggcccattagtcagaggagttttcatgaaatttgtaaaaccaaagctcacagccgcaatttaaatagaaaaggagtgagcctgacactcactccttttgctcatgaatcgaatgtaaaacaagctccgcaaaagcctctgcggcaggcagctgccattttttctttttgggtgtgagtaaatcggatcgagggcttcaccatgctggagatttttcagcttatgtttttcacttccattaatccctataccttaccacatagtttttatacaattcttcgttataaaggatttcttcgccatgtgaagagcaaatgagcgttggtttgatttgatctatgattgagccgctgtcgatgttctcatttatatcaacactgaatcttcttataggtgggtgtaaatcctccttacttgtgataaaaaggtcgcccgtcaatagcgtacgatcgattttatgataatacacaacatgccccggcgaatggccaggtgttaaatagtatttcagaggcagatgagcaagcgtttgctccgtcagcggctgtacaatatgggctacccctgtgttctccacttcatttttgttcggatatggctcttccccattgatgtactttagttctttctggtgcgcaaaaatcggaatatcaaatctctctaaccattttgatgcacccccgatatgatcactgtggccatgggtaagcaaaatggcttttggattgccgatcgctaacgctgccctaatttgagcatcagcaaaacgttctattcccgtatcaacaatataaacatcatcaccatctttgataaaccaggtatgaaccggaatacgaagaggcacatcaagctcaaattcacattgaaagacatgttctgatagttgtctcaaattcacgcaaaccatctcctgtggaaattttttgatagttttaaagaaaacagaagtgaacggactattttcacccacgctcgagctgactggattcttgagaggaaacgccgattttcgccagcatcagctcaacttgttaacgttgtccattaataatcccttttgttccccttcttcacatattcccaatcacgttctatattcttcctcactctatgaaggagtgcagaaatggtttccttttcctctgaagtaaaaccggacaaggccacttccgtggaatgttctccttctcttcttaacaatggatatacctttttccctttctcagtcgggaacagtttttttatttttttattttgctcatccggcagtttttgaataaatccctgcatttccagcttcttaatggcccgcgcggccgttgtccggtccacttttatcatttccgccaatttttcttgaataattcccggattttcgtatatacgcacgagatagagatactgccctcttgttaagtctaaatctttaaattcgatgttgcttatggaatccaacgctcttgctatcatgccgatctcacgcaaaatatcattcattcctaaaacccctcacgtatttttgttgcaattacaacaaaaatgttttaaccttactattataagaccacatgcgtgctgtacagtccagactaatatcagaaaaggattgattcataatgaatataaaaagaataacaactgaagctgatttacatgaagctttaaagattagaagaggcgttttcattgaggagcaacatgtgtctgaagccgatgagttcgatgaatttgatacgcttcaggaacaatgccagcatatcttggtatatcatgagaatcagcctgtcggcaccggacgcgcgcgcatcgttggccatacagcaaagctggaaagaatctgcatcctaaaaccttaccgtaagtacggattggggaagatcatcgtaagcgggttagaggaaatcatgaaagaaaaaggactgacttcatataagctgcatggtcaaacacaagcggcaggcttttatcaaaaactgggctaccagatttcttcacaggaatttatggaggacggcatccctcacgtcttgatgacaaaagaaatatcgcggaatataacatgaaatatatgtattacggaataggcatactcatattaagtttgggcatttccttaaccatacaatcaggactgggcacatcacccttcgatgcccttttggttggtctgtcaaaaaaaatcggtcttaccgtaggaagctgggaggtccttatttctgtgatcctcttaatctgcaacgctatattaacgagaaaaaaacctattttgctgggcttgattacagcattcattactggaataggcattgacctatggttgtttgttgtaaaaaacaccatctatctaaactcgttgttaagcaaactgatttgttttggaattggtttggtgctcatcggtcttggaacagccatctatcttcagacgaaattcgcatcaacaccgatcgatcatttaacacttattatccgagatctctccaaaagaacaatattgttttcaaggacattggtatacgctcttttcttagtattagccatcatctttaaaggccctatcggcatcggaactcttttaacggtttgtttgggaggaatgctccttcacgtttttatgcctattgtggaaagacatttcttatcaaagaatagaagaggttattaagaaacctcttctcgatccaaaaaacgaaacgcaaaacaagccccgtttcgttgtcaattctttatctctggtactgttgaggttttataatcaattaaaatttatagtaccaaaaaatcgcaatttcatttgctgttggaaagttggaataaagcatcgtatcaaccgcacctattataaagtgatgtttggcataaaaatgacaagctgaaatattaatatcttgggtttcaagcataagaccacaaaaatgattctcctttgcccactcaatcgctttatgtaataatgctgttccaacacctttttttctatagtcttttgccacggcaatgtcctctattagtgcatacccattccagttagaacggatcttaatccggccaatgcagttgttttcaagataatataaaaaagccgctttcccctcttcttcaacataactaacatccatgtcatcatcttcatattgtttaaaataaggtttagaaaatcgttcctcagtatatgtccaaacaccgttttcaaaagcaggtatcattctcccaaaaacaacgaaaggttcgtttggtttattgaaatctttcatattcaaatgagtcattttcatgatcatatcaatctccgccaatcgagataatatttagtaaactcgtttcgatactattcaacaacagcttccaaaagtgtactctttaagagaacagcattagataaggcatccattaccttatatatttcactatcttaatgaggtatttcaacagaggcttgtggtacagtaaaaaggaatagaaacaagagaaaagaagatgaacctatgcccactaacaataaactcaatgagaaatatcatacttccttcaactcgcccacaaccctgttgactagtatccgtggagagaggaagctttgacacagcttctgccattgatgacatctctattgaagtatccaaaggacaaccaaggatcgctctttgactttttcaagaagaaagtagagtgaataaaggagtgattgagtatgttaacaagagaagatatctttaaacacgtcaaagaaaaatacggtacatcgcctgattacccgtgggagaaatacccaaactatgcttctttgagacatacatcaaacaaaaaatggtacggtcttatcatgaatgttctcccagaaaaattaggcttggatggtcatggcgaaatagatattctaaatctaaaatgtccccctgaaataagtgatcgcttaagaaacggggaaaatatcttacccggatatcatatggataaggaacattggatttcaattgttttagaacggacagatccagaaggcgaaatctataacttaatcgagcagagctttcatttaaccaagtgaagataaagagtgttcctgctaatcaagctgcgaagagtagtgggcactttcattttaggatactgttcttcactctgtccacaaacgcaacttagttcatctggtgcgagagtgggagaagaatttcaaccaacttcttatgtaaaaggatgaatagttatgacaaataacttaaaacagagaagaatcattttagatttagcagttactttagatggttttattgaagggaaaaatggagaagttgattggtgtattatggaccctgatatggggtttactgattttttaaatcaaattgatactattttatatggtagaaaaagcttcgatttatggggacaatacattccaaaaaatgaagaccctgatacagaaaaggaactttggaaattggttcatagtaaaaagaaatatgttttttccagaacacaaaatgagattgataatcaagccatatttataaatgataatattcttgaagaagtaaataaattgaagaaaaatcctggtaaagacatctggctatatggtggagcgagtctcattacaacttttataaatttggggcttgttgatgaatttagattatctattcaccctgttgttttgggagaaggaaaaccgttgtttattgatgtaaaacagaggataaatttaaaaatggtgaatacaagaacattttcctctggcgttgtgcaaatcgtttatcattggaatggctaacattgtaaagtaacactcgacagtaatccttcttattgaactaaaggggaatccataaataatgggttccccttaatatactatggaattatcaatatcaaattttctgtaataaaagaggattgaaaaggacgatgtctcctcaattaacatcattaagcattatagtatattttcttctccctcttttaagtaatcggctaagttttgtatttataaaaaaacgaaagaaggtgatccaatgcctactaacaataaacccaatagattaatcgctgagaaatctacttattttacttcaacatgctcataaccctgtggactggttcccttggggagaagaagcatatgaaaaagcgaaacgcgaaaacaagcctgttctcgtatctattgggtatagctaacgatggctaatctaaagaacatgctattgatgccatgtttattcattttacaaaaaaggatcaaccttgaattactttcacaagattgatcctttcactcatttagccatgtctccgcgaacgtttatatacattcaagattactagccaacaaataacaatgattcctgcaaaaagtatgagcatattgctatacaaataggtagagtgatcaacgtcaataggcagcagcctatgatctaggaagccgatagataataaaccgcctacaatcgcaatacccgttccctctgataaaaagctcgtgaaattaagcaaactcattccagcgcccgcttccttttctttcaaactgctagacacaactgtagatataactgtttttgtgaaagatagccccccaaaaacaaaaattactataattgtcatgatccatggtgctgcatctataaaaaaggcagcgattaaaaagccggaagaaagcaatgcacttccaatagttagtacatacaaggaacctttccgatcaacaagcaatcccccaatgtaaccaaagatgatgacactcattgttccggggaaaataatgccgcttccaattgctgcagtacttaaatggtgaacatctttcatcatgtaaggaaccatagagacaaatcctgctactgtaccaaatattagtcctccgcaaagggttccaatcacaaaaaagacgtttttccctaattcagggtcaacaaaagggtcctgagctttcctaatgtgttgcacaaatatgaagaaagcaaggatactgatgatcagaaaagaaaatctataagatgttgtaaacagcataaaaaatacgatacctgcagacatcaatataatccctgccatatcaatgtgtcctcttattctctcttcctttttcaacaattttataaggaatggaacggtgataattgttgcagttggaataagcagcaaatacgaccaatggatataatgagcaaccattccgccaatagctggcccaacaccttctcccattgctaccagggacccgatcaggccaaatgctttccccctgttctcttttggaatatagcgcgcaacgacaaccatcacaagagctgggaatgcggctgcaccaattccttgaataaatcgggctagaatgagaataggaaagaaagagtgtccaacaaatccaatgatcgaccctaagccatttaccataatcccaaatagaagcagatttttgatgcccagctggtctgatagctttccatatagagctgttccaatggagaaggttaacataaaggctgtattcacccagtttgcacttgctggcagtttattaaactcgttggcaatatcaggtaatgagacgttcagaaccatttcatttaatacgctgaaaaatgatagaacacaaagccaaatcaaaacttgattgtgccgtaaagttgactgtgaataagacgtattcacaatttcccctccattaatgagggcagacgcagtttatagggtcattgatacgcttccctcttttaattgtaccctgttcattttattgcacttcataataactccccctacatttgattgatatgatcttattatatatagactaaggattaaacttttactttttttataaaaatttgaccagattgcgaaacaaggaaaaacgttattcgcatttatctcaagtggcaaaatgaaacattagtttatattttcacatcacaattatcgataagcagtcagttattgtatttgtttaggataactgtggtaacctgaatataaccaacttaggaagaaggtgatcccatgccaaataaaagtaaacccaatagattaatcgctgaaaagtctccttatttactccaacacgcccacaaccctgtggactggttcccgtggggagaagaagcatttgcaaaagcaaaacgcgaaaacaagccggttctggtcagcatcggttattcgacgacttgtcattggtggcctgggataatcaaatcgtgtggaactccattaaaagataacagaagccattttaaacgataatactatttgttcaaacaatacagtctaccttttatttcattcattttctaaaacctgtaatccgtaaccacgcggtagcaggtttttttatttgcttgacttagagttaactctaaattgtaaactaactttaattaaatgagagggatgatgttgttgtattccattagtaaagctgctgagaagactagtattagttcgtatacattaagatattacgaaaagattgggttacttccaccaccaaaacgaaaaaacagtggaaggcgtttttatacggagactgatattcagttcatgttattcctgaaaagtttaaaggaaacaggtatgtctttggaggatattaatgagtttgtcaaagacggatgcattttggaaaaaatcaattcggatgttaaatcggcacaactctccccatctataaataaacgtattgagattttaaccaagcacttagagaaaatggaaattaaaaaaagggagctggaagaagtgatttctactacaaaaggaaaactggatacatattattcaattttgaaagaggaagtggaaaacaaatgaaacatttaaatatatacataatgttacttggcttctctattttcacgggagctacttttaatcttgcaaaatatacagttggatatttttctccatcgtcttctgcggcatggcgtttcggtttagcggctgcagtgatgctcatcattttgatttttactgaaggtataaagaagagtcaattacggaaaaacgccgtttcatacattgttcttggaattataggaatctttggatttaatgccttgttttttgttggtttaaaatatacatctcccgttaacggagcattaataatggggctgaatcctttattaacagcaattctcgctcgaattatcttaaaggacaacatgacaaaaaaacaagtactcggcatattctttgcattcatcggtgtattgttagtcattacacaaggttctatcgaaaccattaaaaccttatcaatttcaggaggagacttaataatctttacaggtaacgtttgttgggcactttatggcgtacttggacgtcggtttgtaaaggatggtacaccgctatctacaaccacttatacgatggttattggtgctgttagtttaatagtagtttccttatttacatccaaacctgtttctttatcgaacatcccgattggagtttggggggcaattgcttttatggctttttttacaagtgttttgggttacctatggtggaatcaggggattaaagagattggagctagtaaaacatctttatttttcaaccttgttcccgttgtaacgatgattatttcatttgccgttggaacaccaataaaggtatttcaagttattggggctgtgctagttatattaggcgttttaaccgcttcgggggtaatacgtattcctaagtacaatactaaagaacagtcagctatataaagaaatagggagtatttttgagaaaatgtgttaagttaaatatacactaattataggaagaaggtgatcccatgccaaacaaaagtaaacccaatagattaatcaatgagaaatcaccatatttactccaacacgcccacaaccctgtggactggttcccgtggggagaagaagcttttgaaaaagcaaaacgcgaaaacaagccggttctggtcagcatcggttattcgacttgtcattggtgccacgtgatggcccacgaaagctttgaagacgaagaaatcgcgcgtcttctcaatgaacggtttgtggcgattaaagtcgaccgggaagagcggcctgatgtggattctgtttatatgagaatctgccagctgatgaccgggcagggcggctggccgctgaatgtgtttatcacgcctgatcaaaagccgttttacgcgggtacatattttccaaagacgagcaaattcaatcgtcccggttttgttgatgtgcttgagcatctgtctgagacgtttgcgaacgaccgcgagcatgtcgaggatattgcggagaacgccgctaaacatttgcagaccaaaacagctgcaaaaactggtgagggccttagcgaatcagcgattcaccggacattccagcagcttgccagcgggtttgacacgatctacggcggtttcgggcaggcaccgaaatttccaatgcctcatatgctgatgtatttgctacgttatgatcacaatacagggcaggagaacgctctatacaacgtgacgaaaacattggacagcatggcgaatggcggcatttacgatcatatcggctatgggttcgcccgctattcgaccgatgacgagtggctcgttccccactttgaaaaaatgctgtacgacaatgcgctgctgctgaccgcttatacagaagcctatcaggtcacgcaaaacagccgctataaagagatttgtgagcagatcattacgttcattcagagggaaatgactcatgaagacggaagctttttctcggctttggacgcggacacagaaggagaagaaggaaagtactacgtgtggtcaaaggaagagattctaaaaacgctcggggacgatctcggaacgctgtattgccaagtgtatgacatcactgaagaaggaaactttgaaggcaaaaatattcctaacctcattcacacaaagcgagaacaaatcaaagaggatgccgggttaaccgaaaaagagctcagtctcaaactcgaagacgcaagacagcagctcttgaagacacgcgaggaaagaacctatccgcatgtcgatgataaagtgcttacctcatggaacgcgctgatgatcgcgggtcttgcgaaagcggcaaaggtataccaggagccgaaatatctcagcctagcgaaagacgccatcacatttattgaaaacaaattaatcatcgacggccgtgtgatggtccgatatcgtgatggcgaagtgaaaaacaaaggctttatcgacgattacgcttttctcctatgggcttatctggatctctatgaagcttcgtttgatctttcttatttacaaaaagcgaagaaactgacagacgatatgatcagcttattttgggatgaggagcatggcggattctacttcaccggacacgatgcagaagccttaatcgtacgggaaaaagaagtgtacgacggcgccgtgccttcaggaaacagtgtggcagctgttcagctgctgcgtctcgggcaagtcacaggcgacttatcactgatcgaaaaagcggaaacaatgttttccgtgttcaagccagacatagaagcgtatccgagcggccatgctttctttatgcaaagtgtgttaaggcatctgatgcctaaaaaagaaatcgtgatttttggcagcgcagacgatccagccagaaaacaaattatagcggagcttcaaaaagcctttaagcccaacgactccattctggtggcagagcagcccgagcaatgcaaagacattgcgccatttgcagcagactaccgcatcatagacggcaaaacaaccgtttatatttgtgaaaacttcgcctgccagcaaccgacaacaaatattgaagaagcgatccacacattaataagcagcagggattaagacccttgctgcttactttttgatttcttatggtaccataaagcgatccccgcaaacacaaggttgaccgctatcgtaaagaaagcctcccacatcgggttcccccgcgtaacggtaaacagagaaggaattcctccatacacactgtttttttctgtaataaacatacacaaaaacatattattcgcggcatgggcgccaagtgatatttcgatgctcccagttttaatcgtgtaatacgtccacacaaacccaaatgttaagtactcaattcctgcccagacagcgccattgttcatttctggattcgcaaaatgcaatacgccaaacaatcctccgacaatcagtgtcaaaaatagaggatttttcgtcaatctcccgaaagcttgaagcaaaaatcccctgaaaaatagttcctcagctgatgtctgaatcggaaccaaaatgagggcagccgctagcagccagataaatcgtgatgcattaaactcttgcattgaatagctatcaggatgaatcacaaaatcaatcaattgtacggcgatcattagcaagaaataagcaataaaaccaaaggaaattctccgccaattcatctttgaatttggtgttatcaccgttcggaaaggccgcttcaaaataaagcgcacagccagccaaactcccggaatggcgaataaataaatcacatgggacaaataaagatctacgaggggatcactcagcacagcttcatccaaatcaaacgtgatattgggattcacaataaccgtgaacaatatagcgaaaaggtaagctatattccctaatacatataaccctaccatcaccaaaaaagcgaaaaaatatctccacaacgtattgtttccttctataggacggataaatgaattcattccttctatgtctcttcctttcaatgagaatattactatatatttgcataaattggtctatgaatctactgttttggaaatcttttaagcaaaattaaaatataaagtgtgaatttagttcttccatctagtgatttgaactctgttgccaatgaaccaagatacttataatagtcccaagaggggaattttcagtcttttctactactcaaaagggggttttttatgaatacgatcttcaaacaaaagaatacacatcctttctcaaacgcagcgaatcgtttagaccgccttccgatttcacgcgttcatttccaagtgttaaccgctctcggcattgtttatttctttgatctcgcagatttatttaccctcagcaacgtagcgccggcactgatcgagcattggggcatcccgctttcaactattgctaacgtaacggccgcttcgtttttaggcatgtttttaggcgcttcactgggcggacggctgtccgatcgaatcggccgcaaaaaagccttaaatctatttgtctttgttttctcaatcgcatcgctatgcaatgctgcggcatgggacattccatctttaatgacattccgtttcctcaccggatttggcgttgcagccgccatggtcattacgaatagctatttggcggaatttttcccttcaagtgtacgtggaaaatatatttctttttgtgccatgattggattgattggggttccgatcaccaacattgtgtctgcctttgtcattcctcttggttcatggggatggaggctagtatttgtatggggtgccgtcggccttatttattttttcttcatccaccgtctggaagagtcacctcgctggcacgaaaatcgcggggaatatgcgaaagccgatgcgatcctcacccgaattgaagaacaggttgaaaaggagaaaggcccgcttccggcagcatcccagcctaaagtaagcgaaactgttaagcagaatgcaggttacgcaggcttattgaaaggcagaaacctcaaaattaccatcgtattatctgctgtatggatttttgaaacgtttgggttttacggatttgcttcatgggttccaagcctgctaaaaagcaatggcgtaaccatggaaaatacattatggtataacgtattgcattccgtcggcgctccacttggcgcactgctcggctccatgatttccgaaagatttcaaagaaaatggattttagctgcgagtgcgtttctgacggccatcgccgggctcttatatggtatgacttttattcccatcatgatcattgtatttggttttatcgtgaatatcacagaacgggtctttacctcgaacttatacgcctatacatctgaaccttatccgactgaataccgctcgtctggcagcggtttagcctatggtcttggccgtttttcaaacatttttggctcattgcttgtcggatttattgccgttcagctcggctatatcagcgtcttcttatttattgggggctgttggctcgcatgctccttgctgttaatcttcttcggtcctaatacgaatgcaaaacagatttaaaaaagtcagtgcggatctgccgcactgatctcattacaattgcttcaaaatccttgcggggtttccgcctacaacagtattagcgggtacatccttagtgacaacagatccagaagcaatcactgcgttatcaccgattgtcactcccgggttaatcaccgcccggcctccaatccaaacttgatctccaattgtcacaggcttaccgaactccttcccggatttcctttcgatcggatcaagaggatgaccggccgtgtagatatgtacacctggcgcaatcaaacaatgacagccgatacgcacctcacacacatctaaaatgacacagtcaaaattaacaaatgtatgatctccgatatgaatgtgatagccataatcacagcggaatgtcggcaaaatcgtgacttgatccccaaccgaaccgagcagctccttcaaaagcttcgtccgcactgcatcatcttccggtgtttcgttgtattgtctaatcagctgtctcgcatgcttgcgttctagtaatagttgttgatcttccgaattgtataattctccggctgccattttttctttttctgtcctcagcatttaagtcactccagatgtcagattgtaatctcgatcaaatttccttcatcatcctcaatcacgctttcatagtagccgtctcctgttgtcctcgggccgtttactactgcgaaaccatccgccttcaatcgatcagtcagttcgtcaactttctcccggctcccaacggaaaaggcaatatgtgcccagcctgtcattgtttgtgagggcggatcggtcacattcccttttttcataatttccagccttgctccggaatcaaacgtaataaaataagacttaaaatcttttttctcattatgatacaaatcattcgcttcgccattaaaatacgattcataaaaagacttcattcgctctaaatcattgacccagaccgctgtatgttcaatctgcatttcttcctcctccttcgccttcaatgaagttataaggtatgaaatgcatttcagttcaagcttttttcttaaatttatgctgaattttgatatcagcgggttcatcctgcaaaaatagagaaaatgctgcgatgccgagctgctcaagattcaaatcaagcgacggaaaaccaagaacacggctgatagaagtatttccctcgcctatgatttcaacatcccaattattctttttggcaaatagatgaattccagctgccacttcatcactatttgcataaatagcagtcggaacccgcccgctcatataaaaatgttcagctgccagctcaccatcattcatatcgttgcatccggacagcatatggcggtcttccaaccttccgcagacagctttataggccgcagctttatcagccgtgctcgggctcctatcagcttctctgacacacgtaaaagcaatattctcatgcccgcggctctttaaatagcgaaagctctctgcataagcagtttttctgtcattaaaagcacaagggacatcaatgtctccggtatcctcacaagcgatgaccggcccatattcctgataagctaaaatgctgtcccaatgattggcgcgggaagtaatgatgagaccgtctattttcttcgttcttaacagctctaaatatttgatttcaatatcggggttataattggtggggagaagggtcgttgcatactcatgctgaaaagccgccttggtgattccgttaacgattttatcaaagcagggatgatcgctataaggcagaatcacaccgaccgtatgggttttcccgcgaatgagatcgattgcggttcgatttggtgtataatccaattccttcatgacttgatgaacaagctttctcttttcttcagatacatacggatgatgattcaatacacgcgagacagtcgaaacagatacatttgccagtcttgcgatctcttttatatttgccatctctttctccttttcatataaaaaaagcagtaagtgtaaaatccttactgctatctcatcatatattgatgataagttcaacaggacaatggtcggaacccatgacgtccgctgatatgctggcatcttcaatctgttccttaaggctttcagaaacaacaaaataatcaatccgccatccaatatttctgtcccgggcgccggcacgatacgaccaccaggaataagcgccttcaagatcaggataaacatgacgaaaagaatcaacaaagccagcttctaagaaacgagtgaatgcctctctttcttgatctgaaaatccagcgttattccggttcgcctttggatttttcaagtcaatctcctgatgggctacattcaaatcaccgcataaaatcactggttttttctgatccaattcaagaatataagacagtaaagcctcttcccattgcatgcggtaatcaatccgctctaatccccttctggaattgggcgtgtaaacagtcatcacaaacacgttttcaaattccagcgtaatcactctgccttcttggtcatgctcttctactccgataccgtagatgacctgcagcggttcttgcttagaaaaaacagctgtgccggaatatccttttttcactgcataattccagtacacatgatagtcttcaggctggagatcaacctggccgtcctgtatcttcgtttcctgaagacatataatatctgcatcctcttctttcaaataagagaggaaatccatttttctcatcacagcccgcaggccgtttacattccatgaaatcaacttcatgtttcatcctcccccctataaaaaagagcaagaacccgaaggtccttgctctttacatatcagcttactcaccgcttacgtatggaagtaaagccatttgacgtgcgcgtttgatcgctgcagtcaatttacgttggtatttagcgtttgttccagttacacgacgtggtaaaattttaccgcgctcagaaacaaactttttaagaagatctacatctttgtagtcgatgtgcgtgataccgttagaagtgaaataacacactttacggcgtttcgcacgaccgcctctgcgtcctcctgccattgtcatttccctcctttctttttcattttaggcgataatcacattagaatggaagatcatcatccgagatgtcaatcggtttgccgtcgttggcaaatgggtcatcattaaagctgttcccctgattgcgtctctggttgttttgatttcccccaaatggattatcattttggcctccgccaaagtactggcctccgccgctgtttccttcgttgtatccacctgaaccagaaccgccgccgtttttcggctcaagaaattgaacactttcagcttggacctctgtcacgaagacacgctgtccttgctggttttcatagtttcttgtttgtaaacggccatctacgcctgcaaggcttccttttttcaagaagtttgcaacgttttcggcttgtcttctccaagtgacacaattaatgaaatcggcctcacgttctccggactggttcgtaaatgtacgattcacagcaagagtaaacgtagcaacagccgcaccgtttggcgtataacgaagctctgggtcttttgtcagtcttccgactaatacaactcggttaagcataagaaagaccaccttttaccattatatatttcaaaattgcttattcttcttctttaacaacaatgtggcgaatgatatcgtcactgatcttagctagacggtcaaattcttgaactgccgcagcgtcagattgaacgtttacgatttggtagaaaccgtcgcggaaatcgttgatttcgtaagcaagacgacgtttaccccaatcctttgttccagtgatctccgcaccgttagaagtcagaacgttgttgaaacgctcgataactgcttttttagactcttcgtcaatgtttgggcggataatgtacataacttcgtactttctcatctgtttgcacctccttttggactaagcggcccataatgggcaaggagcaataattctattactcacaattttatattataccaaagctcttgtccctttacaactgcatcctatacattaaatcggaaatgaataacatctccgtcttggaccacatattctttcccttcaaggcggacttttcctgcctctttagctcctgccataccgccgcccgcaagaagatcctcataagcaactgtctcagcacgaatgaagccccgctcaaagtcactatgaataattcctgcacactcaggggctttcatgccttttttgaatgtccaagctctgacttcctgttctccggctgtgaaatatgttgcgaggccgagaagagagtaagacgctttgatcagctgatcaagacctgattcttgaatgcccagctcttccaagaacatttgcttttcttcgccttcaagctcagcgatttcagattcgatttttgcacacacaacgataacttctgcgttttcgccggcagcgtactcgcgaatcttcgctacattttcattgccagatggatcagcaacttcatcttcacttacgttggccacgtacaaaataggcttcgaagtcagtaaatggagctgcttcacaagcttttgctgctcttcagtgaattctacagatcgagcaggcttttcactctcaaacgcttctttcagtttagataaaatctcaaactcaaatacagcgtctttatctttttgcttcgcaagcttgctgacgcgtgtaatccgcttttcaactgtttccatatcagcgaggatcagctcaaggttgatcgtttcaatgtcatcaatcggatcaacctttccggaaacgtgtgtaatgttgtcatcggaaaaagcacggacaacgtggcaaatcgcgtcaacttggcgaatatgagataggaacttgttgccgagtccttctcctttagatgcgccctttacaatccctgcaatatcagtgaattcaaaagcagtcggcacagtcttcttcgggttgaccagctcagtcagcttttgcagacgatcatccggcacctctacaattcccacgttcggatcaattgtacagaacgggtagttggctgattcggcaccggcctgtgtaattgcgttaaatagtgttgattttccgacgttcggcaaaccaacaattccagctgttaaagccattctttcatctcctctatataaaaccgtcattgtatgaacgtattttgaacctagagcaattataaggaggttcactggaaaagacaagctgacaaaaaagcattttcagcttgccaatccctttgattatgcttttttcaagcctactaaacagtcaaaaagcgtacttcccattccattatcagaatttgtatcatttgtcagtgcattgactgaccctccaaaagccgcccacatgccttcatctatattaatcgtcttcgcatgagcctgcttcatcactttcaccttgcccttcatgcttccgcggtcattaaagatgacaacttcgtctccatcctgaagatcctgcccagccgctatatctggagaaatatcgacctgaacgtgctgaagcttttcaataaacggcacatgctgtgaatgattggaacgctgcggatgaatggataagagcgtataagggtactttccagctaactcctcattatggaaaacagattcttcgggcacatttaattgaagcgagccgctaaatcctttttgctcagctagcgacgaagtaaattcaaattttccactcggcgtcaaaaactgataatcatcccacggcacctgttttactggaagagggaggtggcctttttcttttaaacgctcaagtgtcacatcctctgcttccaatgaagaaagccccatctctaaaaattcttgagtgctgtattcaaacagctcgccaaacccaagacgttttgcaagctctgaccagatccagctgtccgatttcgcttcaccctgcggctccacaagcttcttcccgtactgaacataatgatgatacatactggaatagtagatatcttcttcttcaaaaacagtggcagtcggcaaaacataatcacacagctctgcggtatccgtcataatggaatcaatcgcgaccgtcattggaaccttttcaaatgcttgtctcaccttatttgtattcggcacctgagtcagcggatttccgcacgtcacaataatcatctcaatcgcaggatcagcagcggtcaacacttcttcagcctgtgtcatcattgaaaaagaacgggatgttgtttttaattccggcagcgtcagctttgtttttgcaaagctctcaccaatctggacatttccgaaattcgcgccgccgcccttaattccgacatttccgcttgccgccacaagtgcatcaatccaacgaatcgttcccccgccgtttttatatcgctgcatgccaagccccataaaagtagacaccggaccatcagcatacaaacctgccaaatactccagctcctccatagaagtttctgttttcacaataaactcttccagagaaacggtcttcaaaagctctttcacatcatcaaaaccgacagaatgctcagaaataaacgtttcatccgttcttcccatctcaatcagaaccttcaaaacggctgccgcaagccagccgtccattccaggctttacagagatatagcggtcggcaagcttagcagtcgggttgaagatcggatcaatcaccgtaatcgtggcgcccttctttttcacctgctgcaagtgatggtataagtgcatatttgttcttgatacatttcttccccacacaacaacatgcttgctgttgtaaatatcaagcggtccgtgaccgtacgaacggccaaaatcccagctttgcgcctcgataccggagccccagcatatgcttccgacgatttcggtcacgccgccatatccattaaaaaaacgctgatcaagcgcttttaacagaccgttattcgcataatcatggctgtgcaaaacagcagtcgtctccgacgtttccttgatttcccgaagtttatcggcaatttcatcaagtgcctgctcccaagaaatccgcacaaactcgccattttgttttttcattggatagcgaagccgatcaggcgaatttgtttttgtctcaagcattctgccgcggccgcagattttaccttccgtaatcggatggtttggatctccgtccacttttgttacctttccatcatcaacagtcaccaaaaagccgcagctgtcccaacaattcagcggacatgccgactgatgcactttgctcatcgccgtcttctccttaccttctatatgaaaaagcatgagtgtcggcctatttatgaagtaggctcctcatgcttgactagtactttttttagttttctttcaaattctcttctcggaatcataacactgtgagagcatccctcacacttaattcgaatatccattcccatgcgtataattttccagctgttcgctccgcatggatgcggttttttcatttctacgatatcattcaggccaaagtctttatccgccaagacccttcacctcttttcctaaactgctgtatctattgtacaaaaaaactgatcataagagcaatcaagatacccgaaaagaaatacatcctcttatttccatttactcaaaataggatataagagcagacaaactaacaaatacaaattgagcatcccatatatcggatacaagaacgcgatcaaatcagaaaatccgaaagaagtaaaaggtaccattaacactaacaaaatcaacacaatcatccatctcggcatatgaataaacgccatcagccggctggacaaacccagcaaaccagctaccgtcgtcgtgtaaatcgccaggcacagcaccgccgtcatacataaaaaaaggaaataaggcgcaccctccagaacggcaaacagcggtatttcaaactgagaaagggagcccgccagctccaccaacgtttcattataaacaaatgagatcacgccaaaaataagaccgcttgccacacttgcgatttttgcttctccgagccctttcatctctttcccaacagaggataaaatcgcaacaactgaaaggatgtttaaagaggtaaacgtaatgctcgcaggccagttatactgctgggacaaatcaatcgtccacgtatggtgatgtgtgctctgaaaggagatcagcgcatataaaagccccgctactaacacaggaatcaaaatactatttatagataatattcctttcacatcccacaaaaacaagcacactgtcacgatgcaaatcagcgtgattccccaccagaaaggaagcttgtacatttgcagggtcacaccgcctccggcaatcatcaccatagtcgtcgaaaacaaataaaaaatgatgaggacatcataaattttcgccagccatggccccattaaatgctccagaaccggcagaaaatgagtggattgaaccttaaaactgattttcatcacaatataagacgagaaaatgaacataattgtaaacagcacaatagcaagtccgctttccgccccaaaaaactgccatatctcctgaccgctcgcatatccggccccgatcaggctccctaatatgagcagcatccacttcattccggctctccacaacactatcacctcatagacaaagttcagcttgttcccgttattgttactatataaataaaggaaagcaaacatgccatattttcatagacatttgaacacaagctgaaattatcatacgaaatacacataaaaaagactgctaatacggcagtctaaaaagagatatttatttgtttgtccgcggaatgaagaagtgaacttcactcttcacttttttctaaccattcctacctattcaagtgtttcataagcagaccattgcttgatcatgatcgaggcaatgggggacaatacttgtaatcgcccactaaccattcatatcatgccctctacttttttaaaatctctggtgccatacacaaagcataaaaaatcatactgctggatatactgtaaacaaccttacataactacacacaccatagcaattctgttacctactataacaaggaagtgaaacccatgaatcgaaaaggcgggcttttttcttctcaggaacgagtaaagcaatatgtttcacatacagatgctgcagcggcaaaacaaatccaaaccatcctttcttcatccttacgtaaagctgctggcaaaccaattgtcgtggtttgtatcggaacagaccgttcaaccggtgactcattaggcccgctcgtaggaatgaaactcaaacagatgcagctcaccagattccatgtctacggaaccttatctgaccccgtccatgctgtgaacatgaaggataaaatcaatgacattcataaattacataaaaacccatttgttatagcagtcgatgcatgcttaggccgcgttaagagtgtgggttcatttcaaatcggggacgggccattaaagcccggagccggtgtacaaaaagaccttcctgaagtgggagatcttcatattaacggaatcgtgaatgtgagcggttttatggaatattttgtattgcaaaatactagactcaacttggtcatgaatatggcaaatgttctagcggaaggtttgagtttaacagatcggacagagtggaggcaagaacgccttaacccgttgcaaaggctcactgggcgcatataaaataaaaaccatcttcgtttgaaagatggttttttcatttatgattctcgttcagacaaaagctctaaaatccggtcaaggtcttcattagagaaaaattcaatttcgattttgccttttttcttctgtcttttaatattaactgttgttccaaaataattttggagataggattcccgttcttttagaaccgcatctttcacaggttcttttttctttgtttcacgtggaacattctgattcaactgctgaatcagctgctcaagttggcgaacattgagctgctccgcaatcactttttgtaccagcggttcaagcttatttttgttttttaagccaagaagcgtgcgtccatgtcccatagaaagcgtgccttcggcaataagctgttgaatattttctggcagtgtcagcagtcttaaatgattcgcaatatgcggtctgcttttcccaagacgtttggcaagctgctcttgtgtgagatctaagtgtttcaaaagggagtcatatgcctgagcctcttcaagcggagataaatcttcacgctgaaggttttctaataaagcaatttccctcattaacgcctctgataattcacggacaatggccggaactgtatctaaacctgccagctttgccgctcgaaaacgccgttcacccgcaacaatatcatagccttttaaagattttctgacgataagcggctgaagaatgccatgctgcagcacagattcttttagttcagctaatgcctcgtcatcaaagtgttttcttggctgataaggattagggcgtaaatcggcaattttaatttcttcaactgtctcttcagacaaatctacctgattaaataacgcattaatcccttttccaaggcctttagccattcgcagccacttcctttgctaaatctaaatatacttccgcacctcttgaccgcggatcgtataaaatgatgggttttccgtgactcggtgcctcactcagacggacattacgcggaataactgtcttatatactttatccctaaaatactttttaacctcttcaatcacttgaatgccaaggtttgtccgggcatcaagcattgtcagcaatacaccttcaatcattaaatcagtattcaaatgcttttgcacaagacgtactgtatttaataactggctgagaccctccaaggcataatattcgcactgtacaggaatcacaacggaatccgaggcagtaagggcattaatcgtcagcaagcccaatgacggcggacaatcaatgataatataatcataattttgctttactgcttcaagcgctctcttcaatctcacttctcttgatattgtaggaaccagctcgatctcagcccctgcaagctgaatcgtcgcaggaatcacatccaagttctctactgtcgttgctttaataatatctattacatctgcatcatctactaaaatatcgtacacacactgctctacatcggctttttcaatccctaatccgcttgtcgcatttccctgcggatcaatatctaccagcagaacccttttccctatgtaagccaaacatgccccaaggttgacagacgtcgttgttttgccgaccccgcctttttggttcgtaattgctatgatttttcccacgatgtcacctactttcacatgaacatgtactatcttgcttctattctatcaaaaaaagattaaagcgtttcatttttttcatcattttgttccgaatcagaagggaaataattgaaaattcaagcacgctttatgctttctcttataaattctgcaatttctatgtttttttgacttaaaaaaggaatttcttaaagaaaaaaagaagaagtcacagtacagaacgtggaaacaggatggtgagaaaatggtttatcaaacgaagagagatgtacccgttacgctgatgattgtgtttctcatattactgatacaagcagatgccattgttccttttgtgctgggaaatatgagagtttccggctggatcatttttattctgctgactcttttaaatggactcatcatttggagctttattgacctaaaatatgtattgaaggaacaccatctgatcattaaagccggattgatcaaacatcaaattccttatgaaaacatcgataaagtcgttcaaaaaaagaaactatggtccggttttcgtctgatcggctctcgccatgccatcacaatatattatcaggggggatggggacatgcagtaatttcaccgcaaaaatctgaagaatttatccacaagctcaaagaaaagaattctaatataataatattcactaaaagtaagtgattaccttttgttaaaaatataaaaagctctcctgcttttcaggagagcttctattttggtatgcgaatcgttaattgaatatattcttcaaattcttcttcttccgtattcaattttacaccgctgtcttccaccattgatagtgactggcgaatcgtgttcatcgcaattcttgtatctctgctgaatgctttgcgtctcggctttggctttctctggccttgctccagcattttcaccacgcggtcttctgtctgctttacatttaaacttttctcaataatctctgtgagcagtgtgacttggagctcaggctgtttcagcggaatcagtgctctggcatggcgctcggtgattttcttctccataatcgcctcttggaccggctgaggcagctttaataaccgaagcttattcgcgattgtagactgcccttttcctaagcgctgtgcgagtgcctcctgtgttaaatcatgcagctcaagcagcctagcataagcatgcgcttcctcaatagaagacagttcttcccgctgcaagttttcgattaacgccacagaagcggtttccgtgtcggaaaaatccttaataattgccggaatcttttcccactcaagcgattgcaccgctctccagcgtctttcacctgcaatgagttcgtattggccttcttcttctgtatgcctaacaacaatcggctgaataatgccgtgtgtatgaatggtcattgctaactctttgattttttcatctgagaaaatggtgcgtggctgaaaacggttgggaacgatagcatttaccggtatttccagaatctcttctttgtttgtatcatgttcagcaatctccggctcctgttccttctcaccaagcccgaagaaacgagagaatgaatgcttcatgtacctacaccacctttaaaaactgccatttttataattctattttctcatggtttttcctgctgtacatccatcaattttgatgaaaatatgatggtattgtcatatcaggctgtctaaattacccttcaattggcgatttattaggagttcccggttttcttggatacttcttaggtgtattttttattttgcgtatcaccataatattacgatcgctttcttcaataggcagcttaaaagaatggatattctcaagttctcctccaagcgtcgtgattgcttttttgcctgcattcagttcttcttcagctgatgcggcttttaaagcaacaaataaaccgtttttcttcaccagaggcaagcaaagctcactcaaaacagataatctcgcaactgcgcgcgccgtcacaatatcatagctttcacgcacgtctttccgttgcccgaacgtttcagctctgtcatggcagaatgttgtattctccaattgcaaagcttcagacaacttttctaaaaacgtaatccgtttgtttagtgaatccacgattgtgacatggaggtgcggaaagcatatttttatcggcagacttggaaaacccgctcccgctccaacatcacaaatcgtgttcacctgattgaagtcgacataaaaagcagctgtaatggaatcataaaaatgctttaaatacacttcttttttctctgttattgaagtcagattgattttttcgttccattcaaccagcatgtcgtaatacagctcaaattgctccagctgacggggagaaagggagatccctttttccgccaaaccagaagtgaattcttcaatattcatgccgtcatcctttctactcggctatcttcgcaatgcgtccctgctctaaatacaccaatagaattgaaatgtccgccgggtttacaccggaaatgcgggaagcctgggcaacagacaaaggccgtacatttttcagtttttgacgcgcctcggtcgcaatccccttaattgcgtcataatcaattcggtctggaatttttttattttccatcttcttcagtttttccacttgctgaagagatttttcaatatatccttcatatttcacttggatttctacttgttctgccacgtcttgaggaaccggcacttctggcggcgccagttttgtgactgtttcatagttcatttcaggacgtttcatcaagtctgtgccgcgaactccatctttcaattcgcttccgccaagagaacggatatattcttgattttccggagacggcttgataattacagaatgaagacgttttttctccgcctcgatcgccgcttttttcttctcaaaagccgcatagcgctcatcagaaatcaatccaatgcgatgtccgatttctgtcagacgcaaatcagcattgtcatggcgaagcagcaatctgtattccgcacgtgatgtcaaaagacgatatggctcattggtaccttttgtcacaaggtcatcaatcagaacaccaatataggcgtcagaacggcttagaattacttcttcttttccaagcgcttttcgtcctgcattgattcccgccataatcccttgtcccgcagcttcttcataaccggatgttccgttaatttggcctgcagtataaaggtttgtgatttttttggtttcaagtgtcggccatagctgtgtcggtacgattgcatcatactcgatcgcatagccggctctcatcatttgcacgttttcaagtccaggaatcgttgcaagcattctttgctgtacgtcttctggaagacttgtagataaaccttggacatagacttcctgtgtatttctgccttccggctcaaggaagatttggtgacgcggtttatcattaaaacggacaactttgtcttcaatggatgggcagtatcttgggcccgtacctttgatcataccggaatacatcggtgaacggtgcaggttgctgtcaataatctcatgtgtctcagggcttgtatatgtcagccagcaagggagctgatctgtgatatattccactgtttcatatgagaaagcgcgaggcacatcgtcaccaggctgaatttccgttttgctgtaatcaatcgtgtcgcttttaacgcgaggcggcgtacctgttttaaaacgaacaaggtcaaaaccgagttcctccaaatgctcagaaagcttaatagaaggctgctggttattcgggccgcttgagtaagacagatcgccaagaatgatacgtcctcttaaatatgtccctgtcgtcatgacaactgctttcgcacgataatgtgcgcctgtttgtgtaataacgcctcggcattcgccgtcttcaacgatcagccgctccacaattccttgcagcaatgttaagtttggttctttttcaagcgtatttttcatttcgtgctgatattggaatttgtctgcttgcgcacgcaatgcacgaaccgcaggaccttttcctgtattcagcattctcatttgaatatgtgttttatcgatgtttcttcccatttctccgccgagcgcgtcaatttcgcggacgacaatcccttttgcggggccgccgacagacggattacatggcataaatgcaaccatatctaggttgatggtcaagacaagcgttttggcgccttggcgtgcagatgcgagggcagcctcaacaccggcatgcccggcgccaatcacaatcacatcgtattggcctgcttcataccccatgattctagttcctcctttaattattttcctaaacagaattgagaaaagagctgatcaattaagctttcgtggacagaatctccaatgatttcccctaaaagctcccagcatcttgtaaggtcaatttgcaccatgtcgatcgggacatcctgttcgatgccgctaagcgcatcttcaatggcgcgttttgcttgctgtaaaatagtgatgtgacgtgtgttgctgacataagtcagatcaccgctttcaatggcacccgtgtagaacagtgattgaatcgcttcttccagatcattgatgccttcctcttttaaaagagatgtcgtaacaactggacgtccattggcaagctcacggacacgttcagtgtcaatcttcggctcaaggtcagtcttattcaaaatcacgataacatccatgccctcaacggcttcaaaaagcttcacgtcttcttcagaaagctcttcactataattaagcacaagtaaaatcaggtccgcttcctttaggacctggcgagaacgttcaacaccgattcgctcaacaatatcctctgtttcacgaatacctgctgtatcaaccagacgaagcggaacgccccttacattcacgtattcctcaatcacatcccgtgtcgttccgggaatatcggttacaatggcttttgcctcatgaacgaggctgttcagaagagatgattttcctacgtttggccggccgataatgacggtagaaagaccttcacgcaagatttttccttgctcagaagtcctcagcagcgtctcaatttcctttttcacggcggttgccttttcgactaaaatctgatgcgtcatttcctctacatcatcatactccggataatcaatattcacctcaacatgggccagtgtttctaaaatctcactgcgcaaacggcgcaccaaagcagaaagacgcccttccatttgattcatagcaacgttcattgcccggtccgttttcgctctgattaagtccataaccgcttccgcctgtgaaagatcgattcggccgtttaaaaacgcacgtttcgtaaattcaccaggctctgccagtctcgctccctctctcaatgcaagctgaagcacttggttcacagtcacaattcccccgtgacagttaatctcgatgacatcttctcgtgtaaaagttctcggcgcttttaacactgataccattacttcctcaacgacacgatccgaaggtctgtctacgatatgaccataatgaatcgtatgtgattcgaccgagctgagtgttttccccttcggtcccttataaattttatctgcgatttgaatggcttctggtccgctcaaccgtacaatcgcaatcgcgccttctcccatcggtgtggaaattgccgcaattgtatccatgttgttcacctctctttacttatacttcatctatataaaaaaatttttattatgccaaaactaaaagataacatagtttggttcgaagtggaagatttgttatccacagaaatagaaattcgtcccttattactttaacttatccacatgtgaataacaattaattttatttcctgaacttcctttttatcaacaggatacacctaaaaagaaaaaacttaaacggcaaaaccttgatattactaggaaaagtagatttttcggatacaaaaaaaccgaaatccaatttttatcggacttcggttttatgctatcttttatgggaaataacgagatgacgattttcgccttcacccattgaatatgttttgatctggtggtttgcatatccagaaagagtatcgtgaataatttttctttcgctggacggcatgggctcaagctggatggattttttcgttttcaaaacctggtcagcaagcttgatggccagctggctcagtgtttcttttcttttcaaacgatagttttctgcatccaccgtcacatttttatattggcctggataacggttaagggcaagctgtgtcaaagtttcaagggcgtttaaagtttgtcctcttttcccaatcaacaatgctgccttttcacctgttatatgatatctcactgtctttttgctttcttgaacagtcacatcagacttcccggcaatggcttcggcaatcgtttgaagatataacttcgcttgctgaatcggatcaatcttttcaaccagctttacgatcgcaggctttttaccgaaaataccgagaaaccctttgtttccctcttcaataacagtaatttctaccttatccttcgttaatcccaactcttgcaatccggactgtactgcttcatcgacatttcgccctgcagcagtcacattcctcactttttctttcctccggctttttgcggctcaggattttttttaatatcaggtcctttaatgaggaaagtttgcgcaatcataaacaagttaccaactacccaataaagagaaagagccgccgggaagttgatcgcaaatacgataatcataattggcataatccaaagcatcatcgccatttgcggattttgctgcgcattgccagccatcatcagtttttgctgaacaaatgtagcgacaccggcaacgataggaagaatatagtaaggatctttttctcctaagtcaaaccataagaagctatgctctgaaatcgcctgggttctcatgatcgcatgatagaatccaattaaaatcggcatctggatcaaaatcgggaaacatcccgccaatggattgacaccatgcttttggaataaagccattgtttcctgttgaagcttttgctgcgttttttgatcctttgagctgtatttttctttaagcttttgcatttccggctgtaaagcctgcatcgctttcgaacttctcagctgcttaatcatcagcggtaaaattaataaacgaattaaaatggtaactagaataattgaaagcccgtagttatctcccgtcaatttcgctacatacgtaatgagctcagacaatggatatactacgtacttgtcccagaaatgcggactatctgcagtgatcggctctttcacactcgagcatccagccaaaagcatgaatacgccaaccatacttaatagcaaccctattctccttttcaacaacatttcctcctataattaatctttacactcttttattgcaaagcatacttgtatgtattttagcatctttcagttttaaatggtgtctttttctgatcaaccagaaaggaagcgcttttaaaagttgtaagaaagcagtggtgatgcctactttgacgaagatttcttatataatgaagactttctgaatagatgctgcagactttttttcgtttcctcatatgtcagctggctcgccggttttctggcaataatgatgtaatccttttccttcagtctctctttctcttcaagaaaggcctgccgaatcaaacgtttgatccgatttcgcatcacagcattgccaatttttttgctgacggaaagcccgacacgcagttcatcattttcaggctgatcaagcgtatataagacaaactggcggtttgcaactgatgtcccatgtttaaacactttttgaaaatcttcatttttctttaaacgatttcgcttcttcaaatgactcactccgatactggctggcagaaacttttaaaatttattatgaacatgagatgcatctgaaccaggaagcatgccccggttcattacgcatcacatctatcttttcccataacgtgaaaaaagaccactgacattattcagtggcctaagctgataatacttttctgcctttgcggcgacggcgtgctaaaactagacgaccgttttttgaactcatacggcttctgaagccatgaactttgctgcgtttacggttattcggttggaatgttcttttcatttatgacacctccctcgaggaatagctgttaaagacagtcttacttattatatttgcgttacctattcattgtcaacttcactagtgcttttatttcttgcaaccataataggataccataccttttcaactttcgaaaccttattttttagattccttaattttacggaaaaaagacaaattcaaacaatttgcccctaaaatcacgcatgtggatatctttttcggctttttttagtatccacagaggttatcgacaacattttcacattaccaacccctgtggacaaggttttttcaacaggttgtccgctttgtggataagattgtgacaaccattgcaagctctcgtttattttggtattatatttgtgttttaactcttgattactaatcctacctttcctctttatccacaaagtgtggataagttgtggattgatttcacacagcttgtgtagaaggttgtccacaagttgtgaaatttgtcgaaaagctatttatctactatattatatgttttcaacatttaatgtgtacgaatggtaagcgccatttgctctttttttgtgttctataacagagaaagacgccattttctaagaaaaggagggacgtgccggaagatggaaaatatattagacctgtggaaccaagcccttgctcaaatcgaaaaaaagttgagcaaaccgagttttgagacttggatgaagtcaaccaaagcccactcactgcaaggcgatacattaacaatcacggctcccaatgaatttgccagagactggctggagtccagatacttgcatctgattgcagatactatatatgaattaaccggggaagaattgagcattaagtttgtcattcctcaaaatcaagatgttgaggactttatgccgaaaccgcaagtcaaaaaagcggtcaaagaagatacatctgattttcctcaaaatatgctcaatccaaaatatacttttgatacttttgtcatcggatctggaaaccgatttgcacatgctgcttccctcgcagtagcggaagcgcccgcgaaagcttacaaccctttatttatctatgggggcgtcggcttagggaaaacacacttaatgcatgcgatcggccattatgtaatagatcataatccttctgccaaagtggtttatctgtcttctgagaaatttacaaacgaattcatcaactctatccgagataataaagccgtcgacttccgcaatcgctatcgaaatgttgatgtgcttttgatagatgatattcaatttttagcggggaaagaacaaacccaggaagaatttttccatacatttaacacattacacgaagaaagcaaacaaatcgtcatttcaagtgaccggccgccaaaggaaattccgacacttgaagacagattgcgctcacgttttgaatggggacttattacagatatcacaccgcctgatctagaaacgagaattgcaattttaagaaaaaaggccaaagcagagggcctcgatattccgaacgaggttatgctttacatcgcgaatcaaatcgacagcaatattcgggaactcgaaggagcattaatcagagttgtcgcttattcatctttaattaataaagatattaatgctgatctggccgctgaggcgttgaaagatattattccttcctcaaaaccgaaagtcattacgataaaagaaattcagagggtagtaggccagcaatttaatattaaactcgaggatttcaaagcaaaaaaacggacaaagtcagtagcttttccgcgtcaaatcgccatgtacttatcaagggaaatgactgattcctctcttcctaaaatcggtgaagagtttggaggacgtgatcatacgaccgttattcatgcgcatgaaaaaatttcaaaactgctggcagatgatgaacagcttcagcagcatgtaaaagaaattaaagaacagcttaaatagcaggaccggggatcaatcggggaaagtgtgaataacttttcggaagtcatacacagtctgtccacatgtggataggctgtgtttcctgtctttttcacaacttatccacaaatccacaggccctactattacttctactattttttataaatatatatattaatacattatccgttaggaggataaaaatgaaattcacgattcaaaaagatcgtcttgttgaaagtgtccaagatgtattaaaagcagtttcatccagaaccacgattcccattctgactggtattaaaattgttgcatcagatgatggagtatcctttacagggagtgactcagatatttctattgaatccttcattccaaaagaagaaggagataaagaaatcgtcactattgaacagcccggaagcatcgttttacaggctcgcttttttagtgaaattgtaaaaaaattgccgatggcaactgtagaaattgaagtccaaaatcagtatttgacgattatccgttctggtaaagctgaatttaatctaaacggactggatgctgatgaatatccgcacttgccgcagattgaagagcatcatgcgattcagatcccaactgatttgttaaaaaatctaatcagacaaacagtatttgcagtgtccacctcagaaacacgccctatcttgacaggtgtaaactggaaagtggagcaaagtgaattattatgcactgcaacggatagccaccgtcttgcattaagaaaggcgaaacttgatattccagaagacagatcttataacgtcgtgattccgggaaaaagtttaactgaactcagcaagattttagatgacaaccaggaacttgtagatatcgtcatcacagaaacccaagttctgtttaaagcgaaaaacgtcttgttcttctcacggcttctggacgggaattatccagacacaaccagcctgattccgcaagacagcaaaacagaaatcattgtgaacacaaaagaattccttcaggccattgatcgtgcatctcttttagctagagagggacgcaacaacgttgtaaaactgtccgcaaaaccggctgaatccattgaaatttcttccaattcgccagaaatcggtaaagttgtggaagcaattgttgcggatcaaattgaaggtgaggaattaaatatctcttttagtccaaaatatatgctggatgcactaaaggtgcttgaaggagcagaaatacgcgtaagctttacaggcgcaatgagacctttcttaattcgcacgccgaatgatgaaacgattgtacagcttatccttcctgtcagaacctattaatccgatacactgctgccgacccgtcggcagcttttctattcggtatctgctccgacaagttttccctttccctaattcgttttttttagtacaattagatattagtgatatttgaaagaggtcgatataatggcaaatccgatttcaattgatacagagatgattacactcggacaattcttaaaattagccgatgtgattcagtctggcggtatggcgaagtggtttttaagcgagcatgaagtgcttgtgaacgatgagccggacaaccgccggggcagaaagctgtatgttggagatgtggtagagattgaaggatttggttcatttcaagtcgtcaattaaagcgggtgacactgattgtatatccagaacttagaactgacatcttaccgcaactacgaccatgctgaacttcaatttgaaaataaagtaaatgtgatcatcggagaaaacgcccaggggaagacaaacctcatggaggcgatctatgtcttgtccatggcgaaatcgcaccggacatcaaatgacaaagaacttatacggtgggacaaagactatgctaaaatagagggaagagtgatgaagcaaaacggggcgatcccgatgcagctcgtcatctccaaaaagggtaaaaagggcaaggtcaatcatattgaacagcaaaagctcagccagtatgtcggggccctcaacaccattatgttcgcgccggaagatttaaatcttgtaaagggaagccctcaagtgagaaggcggtttcttgacatggaaatcggacaggtttctcccgtctaccttcatgatctttctctttaccagaaaatcctttcccagcggaatcattttttgaaacagctgcaaacaagaaaacaaactgaccggacgatgctcgatgttctgaccgatcagcttgtagaagttgcagcaaaagtcgtcgtaaaacgcctgcagtttacagcacagctcgagaaatgggcgcagcccatccatgcaggcatctcaagagggcttgaagaactgaccctgaaataccatacagctcttgatgtatcagatcccctagatttgtcgaaaataggagatagctatcaagaagcgttttctaaattaagagaaaaagaaattgagcgtggtgtgacgctgtcagggcctcatcgcgatgatgttcttttctatgtgaacggacgcgatgtgcagacgtatggttctcaaggacagcagcgaacgacggcgttgtcccttaagctggcggagattgacctgatccatgaagaaatcggagaatatcccattttactattggatgatgtactgagtgaactggatgattatcgccagtcacacttgcttcatacgatccaaggccgtgtacaaacgtttgtcacaacgacaagcgttgatggcattgatcacgaaaccttacgtcaagcaggaatgttccgtgtgcaaaatggtgcgttagtgaagtgaagaaatgaggtgagcaattgtatattcatttaggtgatgactttgtggtttcaacacgagatattgtcggcatttttgactttaaagccaacatgtcgcctattgttgaagaatttctgaaaaaacagaaacacaaggtggtgccttccgtaaacggcacgcccaaatctatcgtagtcacggttcagaatatatattactctcccttatcttccagcacattaaaaaaacgtgcgcaatttatgtttgaaatagattcttagaaattttttatcacgaatatatcgtttagaaaagtgtaggtgaatgacgtggctatggaacagcagcaaaacagttatgatgaaaatcagatacaggtactagaaggattggaagctgttcgtaaaagaccggggatgtatatcggttcgacaaacagcaaaggccttcaccacttggtatgggaaattgtcgacaatagtattgacgaagccctcgccggttattgtacggatatcaatatccaaatcgaaaaagacaacagtatcacggttgtagataatggccgcggtattccagtcggtattcatgaaaaaatgggccgtcctgcggtagaagtcattatgacggtgcttcatgccggaggaaaatttgacggaagcggctataaagtatccggaggattacacggtgtaggtgcgtcggtcgtaaacgcactatcaacagagcttgatgtgacggttcaccgtgacggtaaaattcaccgccaaacctataaacgcggagttccggttacagaccttgaaatcattggcgaaacggatcatacaggaacgacgacacattttgtcccggaccctgaaattttctcagaaacaaccgagtatgattacgatctgcttgccaaccgcgtgcgtgaattagcctttttaacaaagggcgtaaacatcacgattgaagataaacgtgaaggacaagagcgcaaaaatgaataccattacgaaggcggaattaaaagttatgtagagtatttaaaccgctctaaagaggttgtccatgaagagccgatttacattgaaggcgaaaaggacggcattacggttgaagtggctttgcaatacaatgacagctacacaagcaacatttactcgtttacaaacaacattaacacgtacgaaggcggtacccatgaagctggcttcaaaacgggcctgactcgtgttatcaacgattacgccagaaaaaaagggcttattaaagaaaatgatccaaacctaagcggagatgacgtaagggaagggctgacagcgattatttcaatcaaacaccctgatccgcagtttgagggccaaacaaaaacaaagctgggcaactcagaagcacggacgatcaccgatacgttattttctacggcgatggaaacatttatgctggaaaatccagatgcagccaaaaaaattgtcgataaaggtttaatggcggcaagagcaagaatggctgcgaaaaaagcgcgtgaactaacacgccgtaagagtgctttggaaatttcaaacctgcccggtaagttagcggactgctcttcaaaagatccgagcatctccgagttatatatcgtagagggtgactctgccggaggatctgctaaacaaggacgcgacagacatttccaagccattttgccgcttagaggtaaaatcctaaacgttgaaaaggccagactggataaaatcctttctaacaacgaagttcgctctatgatcacagcgctcggcacaggtatcggagaagacttcaaccttgagaaagcccgttaccacaaagttgtcattatgacagatgccgatgttgacggcgcgcacatcagaacactgctgttaacgttcttttacagatatatgcgccaaattatcgaaaatggctacgtgtacattgcgcagccgccgctctacaaggttcaacaggggaaacgcgttgaatatgcatacaatgacaaggagcttgaagagctgttaaaaactcttcctcaaacgcctaagcctggactgcagcgttacaaaggtcttggtgaaatgaatgccacccagctatgggagacaaccatggatcctagctccagaacacttcttcaggtaactcttgaagatgcaatggatgcggatgagacttttgaaatgcttatgggcgacaaggtagaaccgcgccgaaacttcatagaagcgaatgcgagatacgttaaaaatcttgacatctaatcataaaaagccttatttccaataagaaataaggcttttttctgaacaagatcagatgcagcgatgcctgcaatacctatatattctagcaatttaatgtgtataatcataagtttattgatataatggagaatagtgaaatcgtattgaaggtcataatggacaatctactcccacatatttcatgtgatacttcagggaggttttttaatgagtgaacaaaacacaccacaagttcgtgaaataaatatcagtcaggaaatgcgtacgtccttcttggattatgcaatgagcgttatcgtgtcccgtgctcttccggatgttcgtgacggtttaaaaccggttcatagacggattttgtatgcaatgaatgatttaggcatgacaagtgacaagccttataaaaaatccgcgcgtatcgttggagaagttatcgggaaataccacccgcacggtgattcagcggtatatgaatccatggtcagaatggctcaggatttcaactaccgttatatgctcgttgacggtcacggaaacttcggttctgttgacggagactcagcggcggccatgcgttatacagaagcacgaatgtctaaaatctcaatggagattcttcgcgacatcacaaaagacacaatcgattaccaggataactatgacgggtcagaaagagaacctgtcgttatgccttcaaggttcccgaatctgctcgtgaacggtgctgccggcattgcggtaggtatggcaacaaacattcctccgcaccagctgggagaaatcattgacggtgtacttgctgttagtgagaatccggacattacaattccagagcttatggaagtcattccagggcctgatttcccgaccgcgggtcaaatcttgggacgcagcggtatccggaaagcatacgaatcaggccgaggctctatcacgatccgggcaaaagctgagatcgaacaaacatcttcgggtaaagaaagaattatcgttacagagttaccttaccaagtaaataaggcgaaattaattgagaaaattgctgatctcgtaagggacaaaaagatagagggtatcacagatctgcgtgatgagtcagatcgtacaggtatgagaattgtcattgaaatcagacgcgatgccaatgcgaatgttatcttaaacaatctgtacaaacaaactgctctacaaacatcttttggcatcaacctgcttgcgcttgttgatggccagccgaaagttttaactcttaagcaatgcctggagcattaccttgaccatcaaaaagttgtcattagacgccgtactgcttatgaattgcgtaaagcagaagcgagagctcatatcttggaaggattgagagttgcactggatcatctcgatgcagttatctcccttatccgtaattctcaaacggctgaaattgcgagaacaggtttaattgaacaattctcactgacagagaagcaagcacaagcgatccttgacatgaggctccagcgtttaacgggactggaacgtgaaaagatcgaagaagaataccagtctcttgttaaattaattgcagagctaaaagacatcttggcaaatgaatataaagtgcttgagatcattcgtgaagaactcacggaaatcaaagagcgttttaacgatgaaagacgtactgagatcgtcacttctggactggagacaattgaagatgaagatctcatcgagagagaaaatatcgtagttactctgacgcacaacggatacgtcaaacgtcttcctgcatcaacttaccgcagtcaaaaacggggcggaaaaggtgtacaaggtatgggaacaaacgaagatgatttcgttgaacatttgatctctacgtcaactcatgacacgattctcttcttctcgaacaaggggaaagtgtatcgtgcaaaagggtatgaaatccctgaatacggcagaacggcaaaaggaatcccgattattaacctgctggaggtagaaaagggtgagtggatcaacgcgattattccagtcacggaattcaatgcggagctttacctcttcttcactacaaagcatggggtttcaaaacgaacatcgctatctcaattcgctaatatccgcaacaatggtctaattgctctgagtcttcgtgaagatgatgaactgatgggtgtacgtctgactgacggcacaaaacaaatcatcattggaacgaaaaacggtttactgattcgtttccctgaaacagatgtccgagagatgggaagaactgcggcgggcgtaaaaggcatcaccctgacggatgacgacgttgttgtcggcatggagattttagaggaagaatcacacgtccttatcgtaactgaaaaagggtacggaaaacgaactcctgctgaagagtacagaacccaaagccggggcggaaaaggactcaaaacagcgaaaatcaccgagaacaacggccaactagtagcagtgaaagctactaaaggtgaagaggatctaatgattattacagctagcggcgtactcatcagaatggacatcaatgatatctccatcaccggacgtgtcactcaaggtgtgcgtctcatcagaatggcagaagaagagcatgttgctacagtagctttagttgagaaaaacgaagaagatgagaatgaagaagaacaagaagaagtgtgaaaaaaagcgcagctgaaatagctgcgcttttttgtgtcataaccctttacagtcataaaaattatggtataatcatttctgttgtctttttaaagacacaagcatgaccattatgactagtaaaaactttttcaaaaaagtattgacctagttaactaaaaatgttactattaagtagtcgctttgagagaagcacacaaagttctttgaaaactaaacaagacaaaacgtacctgttaattcatttttatcctaagtcagtcgaaatcactgttgatagccctgatgggtatatccgcgcatcggctcaaagcaactttgatcaatgcggtgaactcactggcagcagtgttaaagaggtcaaaacctcaccgggaccgaaaaatgttttcacgactatcaatgaaattcagttaaacagaacggaatttggctggcgcattcagttggatgcgaacggcgtaatagtcgataataacagtcagaaggtcacacaattatatcggcagacgctggaggggatgtaccagctgaacaacaatggacttatcagccacgtggttaatcgttcgattattgcggccacaaaaccaggagataaagataaaaccacagtgggcgcaatagactacgtattcaattcatcagggttgctggcaagggtggtaagcaaaggaagtttggcgatagataactatacaactgtatacagctatgatgacaatgatcgcctgatcaaaaccgagtccccctcaaccatagaagagtatacctacgataacgagggccgtgatctgtccctgagcaagacccagacgtatttcaccattgaaaaaaacctgacaacgtgtgaggagtggaactcgcatggagaatgcacacgcgccaatatggataccacgattgtcccagccgatcggacgggtaaacagtatgtggaaaaacataaggccgtgatgacgacgaaatatgaatactggaactgaccattcaacccgccaaatagggtagccaaaatggtattggaatcgaaattgatgttcgtggtgtacctgacttcagtaaatgtggtgtgagatgaaaatcataatattcgttgttttacttattgccagttttatcctcgtcccggacagctggattaatgatgttttcatgcaacatatccagatatcaggcgatggtgaagaagccatgaataactatgatttcacagcaattctgatcaattttggtctgtctgcaatgatagcgtttgtactgatgatgcttatgaaagtgctgaaaaaatgaaccagggtggcaggtacgcacgtaacaacaaagtgagcatttttactctatgctatttagactgttcgtatgccattgccttacccgtacttgatctgctctcagatctggtgataaacggccgcattttaccggctatttttcttcagaaagtatgatcccagatctgatagcgacaacatgtcttcctgtcattcacggcatacattcacaagcttgatgctatccgccggagcgaatccttcgtttatagcgagtcagatgcgccacgaaaatgctaagatagtccatgaggtatattcaaagtggattgcaggtatgaacgtgcatcgggttgtgacgctgagtgaccgactgcaaacgttactgccccattatgccctcaggcttaaacgatactggataatatcgtttaaaattagtaggatagccacttcatatttaataccttaaaaattatgcgtctggttttatcgtccttttttgcacttggtctgtttagcagccaggcctttgccgcgcccgggcaaacgccgcagcctgacattcgtgacagcggcttcgtctattgcgtaagcggccaggtggatactttcaacccgcaaaaagcgggcagcggcctgattgtggatacccttgccgcgcagctttacgatcgtctgcttgatgtagacccgtacacttaccgtctcgtgcccgagcttgcggaaagctgggaagtgctggataacggggcaacctaccgttttcacctgcgcgatgatgttgcgtttcagcgtactccatggtttaccccctcgcgcaagctgaatgcggatgacgtggtcttcaccttccagcgtatcttcaaccgcaatcacccgtggcataacgttaacggcagcaatttcccctatttcgacagcctgcagtttgccgacaccgtgaaaagcgtgcgcaagctggacaaccgcacggttgagttcacgctgacgcgcccggatgcctccttcctctggcacctggcaacccactatgcatccgtcatgtcggccgaatacgcggcgaagctgacgaaaaaagatcgtcaggaactgctcgatcgccagccggttggcacaggtccgttccagctggccgaatatcgcgccggtcaatatattcgtctgcagcgccatgaacacttctggcgcggtacgccgctgatgccgcaggtggtggtcgatctcggctctgggggaacggggcggctctcgaaactgctcaccggggaatgtgacgtgcttgcctggcccgcggccagccagctcacgattttgcgcgacgatccgcgcctgcgtctgacgctacgtccggggatgaacatcgcctatctggcctttaacaccgataagccgccgttgaataaccctgccgttcgtcacgcccttgcgctggccatcaacaaccagcgcctgatgcagtcgatttattacggtacggcggaaaccgccgcctcaattttaccgcgcgcctcgtgggcctacgacggtgaggctaaaattacggaatacaatccggcaaaagcacgtgaacagctgaaagcgctgggcgcagaaaacctcacgctgcagctttgggtgccgaccagctcccaggcgtggaacccgagcccgctcaagaccgccgaactgctgcaggcggatatggcgcaggtgggcgtaaaagtgatcatcgtaccggtagagggccgtttccaggaggcgcgcctgatggatatgaatcatgatttaaccctcaccggctgggccaccgacagcaacgacccggacagcttcttccggccgctgctgagctgtgcggcgataaactcgcagaccaactacgcccactggtgtaaccgggagtttgacgccgtgctgcaaaaagcgctggcttcccaacagctggcctcgcgcatcgacgcctatgatgaagcgcagaagatccttgcccaggaactcccggtgctgccgctggcctcttccctgcgccttcaggcgtatcgctatgatattaaaggcctggtgctgagcccgtttggcaacgcctcgttcgctggcgtgtcgcgtgaaaaagaacaagaggtgaaaaaaccatgattatttttaccttgcgtcggctccttttgctggtggtgacgctctttttcctgaactttgtcggctttagcctgagctatttcacgccccacgccccgctccagggatcgtcgctgtgggatgcctggctcttctggtttaacgggctgctacactgggatttcggcgtatccagcattaacgggcagctgatttccgagcagttgaaagaggttttcccggccacgatggagctgtgcattctggccttcgggtttgccctgatggtcgggatccccgtgggcatgctggccgggatatatcgcaacaaatggcaggataagtttattagcgccctcgccctgctcggcttctccattccggtcttctggctggcgctgctgctgacgcttttcttctcgctgacgatgggctggctcccggtttctggccgttttgacctgctctatacggttaaatcggtgacgggctttgccattatcgacgcgtggctgtctgattcggtgtggcgtcacgagatgatcgtcagcgccctgcgccatatggtattgccggtgctgacgctggcggttgcgccaacaaccgaagtgatccgcctgatgcgcctgagcaccatcgaggtgtttgaccagaactatgtcaaagccgccgccacgcgcggactgtcgcgcctgaccatcctgcgccgcaacgtcctgcacaacgcgctgccgccggttattccgcgtctgggattacagttttccaccatgctgacgctggccatgatcaccgagatggtctttagctggcctggcctggggcggtggctgattaacgctatccgccagcaggactacgccgcgatttccgcaggggtgatggtgattggttcgctggtgattattgttaacgtgttgtccgatattctgggtgccatggctaacccgttgaagcataaggaatggtatgccctacgataacgtatacagtgaaaagcgcacgcccggtgtgctgcgtaccgtgtggcgtaaattctatggtgataccacggcaatgatcggcctttatggctgcgccggtctggtgttgctctgtgtctttggctcctggtttgcgccgtacggcattgaccagcagttccttggctatcagctgctgccgccgtcctggtcgcgctacggagaggtctctttcttcctgggaacggacgacctcggacgtgacgtgttgagccgcctgctgagcggtgcggccccgacggtgggcggcgcgtttgtggtgacgctcgcggccacgatctgcgggctggcgctgggtatttttgcgggatccacgcatggcctgcgctcggcggtgcttaaccacattctggatacgctgctgtcgattccgtcactgctgctggcgatcgttgtggttgcctttgccggtccgcacctgtcgcatgccatgtttgccgtctggctggctatcctgccccgcatcgtgcgctcggtttacagcatggtgcatgacgagctggaaaaagagtatgtcgtcgctgcgcgtctggacggcgcgaccaccttcaatattctgtggtttgccgtgttgcctaacatcgcgtccgggctggtcaccgagatcacccgcgccctgtcgatggcgattctggacatcgcggcgctcggcttcctcgacctcggcgcgcagctgccgtcgcctgaatggggcgcgatgctcggtgacgcgctggagttaatttacgtggcgccgtggacggttatgctgccgggtgcggccatcatggtgagcgtgctgctgatcaacctgctgggcgacggtattcgccgtgcaattaacgcgggggtgcaataatgccgcttcttgatattcgcaacctcaccattgaattcaaaaccggtgaaggctgggttaaagccgtcgatcgcatcagcatcaccctcgcggagggtgaaattcgcgggctggtgggggaatccggctcaggcaaaagcctgatcgccaaagccatctgcggcgtggcgaaagataactggcgcgtcaccgcagaccgtatgcggtttgatgatatcgacctgctgcgcctctctccccgcgagcggcgtaagctggtcgggcacaacgtctccatgattttccaggagccgcagtcctgtctcgacccgtccgagcgcgtgggcaaacagctgatgcagaacatccccggctggacctataaaggccgctggtggcaacgcgtgggctggcgcaagcgtcgtgccattgagcttttacaccgcgtcgggatcaaagatcacaaagatgcgatgcgcagcttcccgtacgagctgaccgacggtgaatgtcagaaagtgatgattgccatcgcgctggccaatcagccgcgtttgctgattgcggatgaaccgacgaacgcgatggagcccaccacgcaggcgcaaatcttccgcctgctgtcgcgtcttaaccagaacaacaacaccaccattttgctgatcagccatgacctgcaaatgctcagcaaatgggcggataaaattgatgtgatgtactgcggacaaacggttgaaaccgcgccgagtgaagacctgatcaccgcgccgcaccacccgtatacgcaggcgctaatccgcgctattcccgattttggcagcgccatgccgcataagagccgcctgaataccctgcccggggcgattccgctgctggaatcgttgccgataggctgtcgtctggggccgcgttgcccgtatgcgcagcgtaaatgtatcgagacgccacgcctgaccggggccaaaaatcatctttacgcctgtcatttcccgctgaacatggagagagagtgaaatggtcgaaaccttgctggaagtccgcaacctgagtaagacctttcgctaccgcacggggctgtttcatcgtcaaactgtcgacgcggtaaaaccgctcagctttaccctgcgtgaaaaacagaccctggcaatcatcggcgagaacggttccgggaaatccaccctggcgaaaatgctcgccggcatggttgaaccgaccgcaggcgaagtattgattgacgatcaccctctcacgttcggggattactctttccgcagccagcgcatccgcatgatctttcaggatccgtcgacctcgctcaacccacgccagcgcatttcgcagatcctcgattttccgctgcgtctgaacaccgacctggagcccgaggcgcgccgtaagcgtatcttcgaaacactgcgcatggttgggctgttaccggatcacgaaagctactacccgcacatgctggcacccggccagaaacagcgtctgggtctggcgcgtgcgttgattttgcgcccgaaagtgatcattgctgacgaagcgcttgcctcgctggatatgtcgatgcgttcacagctgattaacctgatgctggaattacaggaaaaacagggcatctcgtatatctacgtcacccagcatctggggatgatgaagcacatcagcgatcaggtgatggttatgcaccagggtgaagtggtcgaacgcggcagcacggcggatgtgatggcctccccgcttcacgagctgacaaaacggctgatagccgggcatttcggtgaagcattgacggccgatgcgtggcgcaaagatcggtaaacaaacgttgcaccgcttaataaggattaaatagccttaacacgctgtttaatccttaactttttcatctccatagctgctccatattctcagcaaaatacatcaacagttcttctccagaatatccggacattacggaggagaagaaatgaacaacgccacttacgttctcaaatataccgagtacctcatcagaaaatgtcgttcatttttaatgacggacctgtactttcatactgtgaggctcaagaaaacatcggggaagcaccctgacattaaatcccccacgacgttgagtgaaaaaatatgtcatcgtctggtttatgaccacaataacgtctataccctgcttgccgataaactcgccgttcgggaatacgtaatctccagaacaacgcgtgcgaaaacggtgccattacttggcgtgtacagcaaggtgtcccagattgatttttcgacgctccctgaaaaatttgtccttaagtgcaaccatgacagtggcagcacaataatatgtacgaacaaagcgcaatttaacgtcagggaagcgtgtaaaaaactcagtctcgcgttaaagaaaaatatgtactacaccacgcgcgaatggcagtacaaaaacattacgccaaaaatactttgcgaaccgtatgtcgatctcttcgatgatgcagacaggaacacagcgcccgaaatgctaaggatccattgctttcatggcgttgcccactatgttgaagcggattttacggatgacagcggcaaaggtttcatcaacgtttacgacaggtactggaacttacaaccctttcagatggaatatccgaatacaccgttggcgccaggcgaaccggccttgttccgacaagcgttgctggcatcccaggagctggcggatggcattgactactgccgcgttgacctcatgctaaaaaaagatgaaatctatttcagtgaaataaccttaagcccgagacgcggtaaactgtcgattaccccgcaggaatgggatgctaagctaggaaaaatatggcatttaccgccggcaggcacatttgacctgccgctgacgctcacgagtcgggccaggtgagtttaaatatcgaatggttttgcgttgataaggtataggtaacatcgccaccatgcgccagcatgatggcttttaccaccgacaagcccaaaccacagccttccgggttcaactgtctggcgccgttatcgcgctgaaagggctgaaacaggaagtcatgaaactccctgggaatacccggtcccccatcctgaatcaggataaaattgcctttatccgaaacaccattttttaccgtgagcttgcgcgaggttgaatagtgtaaggcattgtcaaataaaacggtcagacactgattgatgcgtaagggatcgaatgcgcactgctgctccctcagttcggtatggacggtaaatgccttacggttgaactcgggcatgaaggtatcgagcgcatcctgtattgtccctttcagatccgttctggcccggtataacgtgtatcctgccccgccatccgaactgataacccggagatcttcaatcagacgggttaatccttccgtctgtttaaggaggttagtaaacagcaccggatccggggtaaacaccccgtcaactagcccctgaagtcttccgcgtaaaatggtgaccggggttctcagttcatgcgcaatcgcagcattccaggatttccgctggatatccagcgtttgcagcttttctgccatttcattgaaatccgtaaccaggtgattgatctctcccagccgggaactggcacagaatgcccttgcgtccagatcgccctgagaaatttttttcaagctggacgcgaccgcgtttagcggggtgagtattcgcgatgaaagtttgaccgtaaagaatacggcaatgatcaggctgatcgttgtcgcggtcccaatccatacccagtcccacatcgtcatctgctcgtcatcgcccgcagcagggccgccgggaagatgatccagaataaaggagtaaaaaaaccaggagcccagtatggcgatggcaattatcgtaaacgtcagcaatagcatatacgttaagatctgacgactcaggacagactctttattcatttcttttccccaagccggtaacccatgcccctgatgctctcgggaacgccataaagaccggccagctccagtttttttcgcagcttgctcatatggctgtcgacggttctgtcgagcgtatcgccttccggcaaacacgcgttgagcaactcttcacgggaacagaccttgcgcggataccgcaccaggtaagaaagcagcttaaattcggtcgtcgttaagaccggggagataacctcgggccccgcagtaacctccacgtagaaatcatccggatagaccgtaatgaatggcgttctgagcggcagggcccccgcctgctgaaacgcaggctttgttctacgcagcaccgcctcaacccgtgcgacaacttccgaagggttgaagggtttgattacgtaatcatccgcgccgagcctcagacccataagtttatcgacgtcctgatcgagagcggaaaccataatgacggggacagcgctttcatggcgaagcgtggtaagcacgctccagccgtcacacacgggcaggtgaatgtccagcaagatgagatccggtttatggaggcgattgagcgttatcgcctgctcgccctgcctggccctgagcgttttcattcccgaacgctctaagtagctcatcagtatatcggcgatttcgtcttcatcttcaacaacaaggatcagcgtatttttgttcatattatctccgcgggtgaaatccctttaagcacgctatcagatatcttgagcacaataagacacagcctccgggaaaaagtgccgtagtcacgaaaatttcccggttgatttaaatgcccggttatttctccacacagcctacacattcagtcaataaagactcgacaatgtccgttcaaaatcgctaatgaggcataacgcgttgtgcattgcgcgctgcaaattaccactgtttcttaaagattttatgaagttggctgaaataatgaacatggaactttctaaatatttttctcctaaaaaactgggtatatattccctgtttctgctgctgtcatggggattactttatacctggctggtgctggtacacagaatggatgagaaagtcgcctcgacgctgctctcttcaccccttatctatggctgcatcgcattgtcagtgatttttctggtcatacaaaataaagccggcgcgttcattgagctacttatcatcgccttctggctgatggtgatttttgtttatctcattattacgttcaccgtgctgttaaacgcgatacccgatattgaggatctgatcttttactatgaatgttatttgatcattttttttggtggagcaccgctgtacctcattatgagaatgatctgagcccttgctccacacggcctccataaaccgcccacttccgctaaacaggtgcgcggtagagtctctgcctcactcttttgcacaaaaataacccaatgcctcatttttttatcgaacgtcccattttcgcctgggttgtggcgctgtttatcgtcctgacgggtctcctgtctattcctcgtttgccggttgcgcagtatccggcggtggctccgccaggcatcattatttccgtcagttacccgggggccagccccgatatcatgaatacgtcggtgatttcgttaatcgagcgcgaaatctctggcgtagataatttgctctacttcgaatcatccagcgacacaaccggttcggcatcgattaccgtcacgtttaaacccggcacggacatcaagctggcacagatggatctgcagaatcagataaagatcgtcgagcctcgtcttcctcaggcggtaagacaaaacggcattaacgtcgaggccgctaattctggatttctaatgatggtggggctgaagtccaccagcggtcaattcgaggaagccgacttaagcgattattttgcccgaaacgtcagtgacgagcttcgtcgcgtgcccggcgtagggaaagttcagctgtttggcggcgaaaaagcgctgcgtatctggttggatccgatgaagctccacagctacggcctttcggtgagcgatgtacttactgctgttggccagcaaaatgccctggtttcgcccggcaaaacgggagatgaaccagcatctgcgggacaaggcgtaacgtatcccatcaccgtgaaggggcaactcacttcggtagaggcgttcagaaacatcaccctgaaatcagatgcaccgggcgcgaggctgaaactgtccgacgtcgcgcgcgttgagtccggcctgcaaagttacgctttcggtatccgcgaaaatggcgtgcccgcaacggcggcggcaatccagctgtcgccgggtgccaacgcaatgagtacagcttcaggcgtacgcgcgcgcatcgacgagctttccctggtgttaccggaaggaatggcgtttacggttcccttcgataccgcgccgtttgtgaaactgtctatcatgaaggtggttcagacctttgtagaagcgatggtgctggtcttcctggtgatgcttctgtttctgcacaagatacgctgtacgcttatcccggcgattgttgctcccgtcgcacttcttggcaccttcacggtgatgttattgagcggatactccatcaatattctgacgatgttcggcatggtgctggcgatagggattatcgttgatgatgccattgtggttgtggagaacgtcgaacgactgatggcggaaaaaagcctctccccacgggacgctacccggcaggccatgcaggagatcgccccggcgattatcgggatcacgctggtgctcactgccgtctttatccccatggggtttgctgagggttcggtcgggattatctatcgacaattttgtatttctatggcggtctccatactgctgtccgcgtttctagccctgacgctaacgcctgccctgtgcgcaacgttactcaagccgcacaaggcaggaaagagcggaagtggaaggttcgcggccaggtttaacgcgcgcttccgtttgctcaccgtctgttacgaagccgggctgggtgccgttctgaagcgaaccgggcgtatgctgctcctgtacgttgcgctctgcacggcgctgtttgttggattgtcttcgttaccgtcgtcctttctgccggatgaagatcagggctactttatgtcctctatccagctgccttctgatgccacgatgcagcgcaccctcaacgtggttaaaaaatttgaagcggaaattgcggcccggccggacattgaaagcaacattatgatcctggggtttggcttttcaggttcaggaccgaattcggctatggccttcaccacgctgaaggactggaaaaatcggcagggctcgacggctcaggatgaagccgaccacatacaggccagcatgacgaacgtcactgatgccgtcacaatgagcctgctcccgccggccatttcggatatgggcacctcctcgggcttcacctggtacgttcaggacagagcgggagcgggctatgaggctctaaagagggccgccgacgcgctggttctgcaggctaatcaatgccctgaactcagcgatgtctatatagacggtctgccggaaggaaccagccttgcgctccaggttgaccgggaaaaggcggaagcgatgggcgtctcattcgatgaaatcaaccagacgctctccgtcaccctgggctcaaattacgtcaacgactatacgaacaacggccgcgttcaacaggtgattatgcaggccgatgccccctatcgaatgcagcccgagcagatactgaaactatcagtgaaaaaccggatgggtgagatggtgccggtatcaacgtttgcgacgatctccgggaacgttgcgccgcagcagttgacgcgctaccagggttattctgctatacggattaccggaagtgcggcgtcaggcgtatccagcggcaccgcaatgaaggccatggagggcttgtccaggagcctgcctcagggcatggcgggtgagtgggccgggagttcgctacaggagataaaatcggaatcgcagcttccgggcctgatcgccctatcgatactggtcgtgtttatggtgctcgccgcgctgtatgagagctggtctattccatttgcggtcatgctggtcgttcctctgggccttatcggcgcggtgatagcggtgtttgttgccggcatgaccaatgacgtgttctttaaggtcggtctgattacgctcatcggcctgtcggccaagaacgccattctgattgtggagtttgccaggcagctgcatcgcgaagggcaacccctgctggcggcgaccattcatgccgtcagtcagcgtctgcgccccattctgatgacatcgttagcctttaccttaggagttgttcctctgatgctggccaccggtgcgagcgacagtacgcagcatgccatcggtaccggcgtatttggcggcatgattagcggtacgcttctcgcgatcttcttcgtaccggttttctttatcgttattgcgcgcttcatcggcaacatcaggaaagcgtgaacacccttgcgggatcgcgcctcctcgctggttggatgaggcgaagctgttgccgggtgatatactggacgaatgctgaaatttcgcgcccccgcgagtccgcggcgcattcttcggggcatgcgacttcggagaagtgcgagaaatatcgtgacacaaagggccgtgagtgggctataatttcgagctaatttcgaatgattttgaaatactgcctgtaacgctatgaattacaaggcaaaataagcaatgaatataaggattaaagctatgggttttctttccggtaagcgcattctggtgactggcgttgccagcaaactgtccatcgcatacggcatcgcacaggcaatgcatcgcgaaggcgctgagctggcgttcacctaccagaacgacaagctgaaaggccgtgttgaagagtttgccgcgcagctgggttccagcattgttctggaatgtgacgttgcacaagacgaaagcatcgacggcatgtttgctgaactggcaaaagcatggccgaaattcgacggtttcgttcactccatcggcttcgcgcctggcgaccagctggacggcgactacgtgaacgcggtaacccgtgatggcttcaaaatcgcgcacgacatcagctcctacagcttcgttgcgatggctaagtcctgccgcgcgatgctgaacccgggcgcagccctgctgaccctgtcctacctgggcgcagaacgtgcgatccctaactacaacgtaatgggtctggctaaggcgtctctggaagccaacgtacgctacatggcgaacgcaatgggtcctgaaggcgtgcgcgttaacgccatctctgcgggtccaattcgcaccctggccgcttccggtattaaagatttccgtaaaatgctggcacactgcgaagcggttaccccgattcgtcgtaccgttaccattgaagatgtgggtaactctgcagcattcctgtgctctgacctttccgcgggtatctccggcgaagtggttcacgttgacggcggcttcaacatcgctgcaatgaacgagctggaaattaaataagctgtgactctcttcccgcccgggaagagagtatttcccccccgcgtcaccccttcgttattccgttctgctatttgttatcacctaacaatatttttccctttatctgccttacgccaggatattgatcgccattttgagatcaaggaacgcacatggaacaacgccgtttttccggcaaaggccactggtatcatgaaacccagtcaaaccacgcgcagacggatgttctgcccctggtgcccgaagccgctaacgtcgacgatcgttttttgctcgatttagccctacctgatgagattgtcgccgcctgttctggctggcttacccctgccagagccttatgccaccagctgtttccgctctcaattcccgtgaaccgactgcatacgctcagcgcttacgatcggctcagtaccgcgctaacggtcgctcaggcctgcggcgttcagcggctctgtaaccactacgccgccctcctcgccccgcttcccggcccggactcctcgcgcgaaagcaaccgccgcctggcacagatcacccagtatgcccgccagctcgccagctcacctgatgtcattgatgataaagcccggaaccagcttgatgaggtgggcctgtccacgtacgacatcgtggtgattaaccagattatcggctttatcggttttcaggcgcgcgtggtcgcgatttttcaggcgctgttgggacaccctgttcgctggttgccggggcaccatattcagccgcacacgcttcccgcgagccacgatgcgtggatgccgcttttacccgtcgtcgagctgcgctacgcgaatgcgcatcagctggagtccctgtcccgctggcaggccgaacccgcgctcgaggcgttgacgccggtgctttgtcatgagccgacgctgctcgacctgaccggagaactcctcttaaacagccgggcggagatcccgcagacgtcacccgcactttcggcagcggtcgaactgctgacccgctcgccggaccgcttcagcgccgcgcagtttaccccgctcacggatcaaggactccagggcgaatatgccatcacgctgcttacccaaagtgcgtttgatggctggcttaatcgtctgaaagtggcgtttggtaaagaggaataaccacactcattacccaaagaccgcttgctgagacagtgagaatcgcgtaaaactgtcagccgctcaatggctacgaaaatagaacattatgtttcaggacaacccgctgctagcgcagcttaaacagcaactgcattcccagacgccgcgtgcagaaggggtcgtaaaagccacggaaaagggctttggcttccttgaagttgacgcgcagaaaagctacttcattccgccaccgcagatgaagaaagtgatgcatggcgaccgcgtcatggccgtcattcataccgaaaaggaacgtgagtccgccgagccggaagaactgatcgaaccgttcctgacccgttttgtgggcaaggtgcagcgaaaagacgatcgtctttctatcgtgccggatcatcctctgctgaaagatgccattccctgccgcgccgcccgtggcgttgagcatgattttaaagaaggtgactgggccgtagcagaaatgcgccgtcatcctctgaagggcgatcgcggtttttatgcggaactgacccagttcattacctttggcgccgatcattttgtgccatggtgggttacgctggcacgccacaatcttgaaaaagaagcgccgaacggcgtggcaactgagatgcaggacgaaggtctgacgcgtcgcgatctcaccgcgctggagtttgtcactatcgacagcgccagcaccgaagatatggacgatgcgctctacgctgaagaaagcgccgacggcaaactgcacctgaccgttgccattgccgatcccaccgcctggattgttgaaggcagcaagcttgacgaaacggcgaaaatccgtgcgttcacgaactacctgccgggcttcaacatcccaatgctgccgcgtgaactgtcagacgatctctgctcgctgcgcccaaatgaagtgcgcccggtacttgcctgccgcatgaccattgccgcagatggcgcgattgaagacgatatcgagttctttgccgccaccatcgagtcgaaagccaagctggcctacgataacgtctccgactggctggaaaataccggtagctggaaaccggaatcagaggccattgccgcgcagatccgtctgctgcatcgtatctgcctgaaccgcagcgaatggcgtcaaacccatgcgctggtgttcaaagatcgcccggattatcgctttgttctgggtgagaaaggcgaagtgctggatatcgtggccgagccgcgacgcattgcgaaccgcatcgttgaagaagcgatgatttccgccaacatctgtgccgcacgcgtgctgcgcgacaagctgggctttggtatttacaacgtccataccggcttcgatccggcgaataccgaagcgctggcggccctgctgaagaatcacgacgtgcacgtcgatccggaagaagtgctgaccctgccgggcttctgcaagcttcgccgcgaactggacgcgcagccatcgggcttcctggacagccgcattcgtcgcttccagtccttcgctgaaatcagcaccgagcctggcccgcactttggtctcggcctcgaagcctatgcgacctggacgtcaccgatccgtaagtatggcgatatggttaaccaccgtctgctgaaagcaattatcaaaggcgaaaccgttgcccgccctcaggaggagaccacgctgcagatggccgatcgtcgccgtctgaaccgcatggcagaacgtgacgttggcgactggctgtacgcacgcttcctgcaggataaagccggtacggatacccgtttcgccgccgagatcattgatatcagccgcgggggaatgcgcgtccgcctggtcgataacggtgctgtcgcgtttattccggcgccattcctgcatgctgttcgtgatgaaatggtctgtagtcaggaaaacggtacggtgcaaattaaaggtgaaacagtttacaaagtcaccgacgtgattgacgtcactatcgctgaagtccgtatggaaacccgcagtattatcgcgcgtcctgtcgcctgataacctgttcaattgtcggtcatttcctttccggaaaggccgacaatttttctttttatccccgccacaaaatcattattttttcttactattttcagtctcccctcgcccaaattcgccataattatctacagtaaaagagtgttgttatattcggttacgtgaatttttatacgctcagtatccttttaaatctgactcgttttattataagaattcagggaaaaacaataagttcacttcggttttgccgctgcttctcaacggaaaagtcgactgcaaatgaataattggtgcgctactgaacagctgcgggagaaaacatgatggacgatctggagcagaatttgctgtttcgctacatgggaacccacagcccatggtggcgcttgtcagctgacagcaacgctctgcaccttgccgccagtgaaaatgccgatgtcactcaggtgattgcgctggacgacgatcaggccgatctcatccgtcatttaaccgttattacctccagcatttccatgacgctctcgttatttggggaagatgtcccggttcaccttgtgggccgtaaaattacccgtaatgagtgggccggtacggcttccgcctggaacgatacgccctccgtggcgcgcgacctggctcagggactctcttttgcggaacaggtggtgtcagaggctaactccgtgattgttattctcgatcagaacggcaatattcagcgttttaaccgattgagcgaagagtataccggcctcaaagagcaagaagtgattggccagaacgtgtttaagctctttatgagccgcagcgaagcggctgcctcaaaacgcaatattaccggtttcttccgcaacggcagctcctacgaagtcgaacgctggatcaaaacgcgtaaagggcaacgactgtttctgttcagaaacaaattcgttcacagcggcagcggtaaaaatgaaattttccttatctgttccggtactgatattaccgaggaacgccgcgctcaggagcggctgcgcgtgctggccaacaccgataccatcaccggcttaccaaaccgcaatgcaatccacgacctgatctctgacgccatcagtcaccgcggcgacacgcaggttggcgtggtgtatctcgacctggataactttaaaaaggtcaacgacgcttacgggcatatgtttggcgatcagctgttacaggctgtcgcgctcgccattttgagctgtcttgatgagggacaggtgctggcacgacttggcggagatgagtttatcgtcatggccacccatacttctcagggctctctggaagcgatggcgtcgcgcattttaacccgcctgcgccagccgttccgaatcggcctgatcgaaatttacaccggctgttccctgggcatcgccctcgccccgcagcacggtaacgaccgggaaagcgtcattcgtaacgccgataccgccatgtacaccgctaaagagaacggccggggcaagttctgcgtcttctcgcccgagatgaaccagcgcgtgtttgagtatctctggctggataccaacctgcgtaaggcgctggataacgaccagctcctgatccactaccagcctaaaatcacctggcgcggcgaggtcagaagtcttgaagcgttggtccgctggcaatcgcccgaacgcgggttgatcccaccgctggagtttatctcttatgccgaggagtcagggttgattgtgccgctgggccgctgggtgatgctggatgtggttcgccaggtggcgaaatggcgcgataagggaattaacctgcgcgtggccgtgaacgtctctgcgcgtcagctggccgaccagactatctttagcgacttaaagcaggcgctgaaggatctgaattttgaatactgcccggtcgacgttgaattaaccgaaggctgtctcatcgagaacgaagagctggcgctctccgtgatccaacagttcagcaggctgggggcgcaaattcatctcgacgattttggtaccggctactcctccctttctcagctggcccgcttccctattgacgccataaaactcgatcaatcgttcgtcagggatattcataagcagtccatctcccagtctctggtgcgcgccatcgtcgcggtggcgcaggcgttaaacctgcaggtgattgccgaaggggtcgaaaatgcaaaagaagacgcctttctgaccaagaacggcgtcaacgaacggcagggttttctgtttgctaagccgatgcccgctgccgcattcgagcgatggctaaaacgatatcaggcgcggaaacagcattaactggctttacgcaaccccgccgcgtgatggcggttttgcagcatcaccagacgctccatgtaggcgatatctttcggttccaggcagaaagccgcgtcaacccagtcttccgtgatgtccatcaattcactgcgcggcaattgcagaacgcgcgtacgggcgcgcagcatcgctcttacgccattcagttttggccgtagcgtgtcgatgaaggttcgtgtggagacatagctttgtccgggttcaaacaggagatccaccaggccatgctgttcgtaccattccgccgtatgggattcccccttgtagatgagttcttcagccagcttcattcctgaacggcgagctaccagggaatatccccccatgcccgggaacaggttgaaagcaatctcgggaaaacctaaacgtgcatcgcgctgcgccagaacgaaatggtgcgcaagagcggcctcaaacccgccccctaacgcgctgccttcgaccatggccagcgagatggcccccgtatcaaacccccgggaggccgcatgcacgcaatcgacacaggcgcgcgcataggcccgtaacgcttcacgtcgaccgtgctgaatgcactcgacgaaaaactgcaggtcaccgcccacattgtacatctcaggcaccagcgatccggtcacccaaaaatcgaccgcaaaaccagactggcggacgagccatgaaaggttcatgatctcctctattaacgcatggttgaagcaaggacgtggctgagcccgcaacatcatccagactgtatgtcgctctgcctcgtaatagcctgacagctgggtgaaccgttcagtatcggtaaacagtgtgcaggtaggctgattgataactgtcatagtctaattcctcttataaaaaagcgcgttgcgcgcagttttagactaatccactcaataagcccgcagcatgagggggaataattttatcacttccgtttatgtaatttggttattgcattttttcccttctcttttgaagccaatttctgcatcattgaaaatattaacttttcgcgcctggggtgagattatgtcaactattgacgcacaagctgtagcacaacgaattgataccgtgctggatatcctggtggcgggcgattatcactctgctatccgtaatcttgagatcctgaagtctgaacttcttgctcagaatggcgctgacgatgcgcccgaaaacagacagccaaaagcgccgtgggaagtttaacccccaccgtttccgacctcgtttcgctttattaaatggatgctatgaattcccgacaacaactcattttgcagatggtcatcgatcagggacgcgtaagcgtagtcgatctcgctaaaaccactggcgtttctgaagtcaccatccgtcaggatcttaatctgctggaaaaacagagctacctgcgtcgcgcgcacggctatgcggtcccgctggacagtgatgacgttgagacgcgcatgatgaacaactacgcgctcaaacgtgaactggcggaatttgctgcgtccctggtgaacaacggcgagaccgtctttattgaaaacggcagcagtaatgcccttctggcgcgaacgcttgccgatcaaaaagacgtcaccatcatcaccgtgagcagctatatcgcgcatttacttaaagagacgcgctgcgaggtgattctgctgggcggcatctatcagaaaaaaagtgaaagcatggttggcccgctgacccgtcagtacgtccagcaggttcatttcagtaaggcctttatcgggattgacggctggcagccggagacaggctttaccggccgggatatgatgcgctctgacgtggtgaatgccgtactggaaaaagagtgcgaagccattgtgctcaccgacagctctaaatttggtgccgttcacccttacacgatgggtcccgcttcacgctttagccgcgtgattaccgatgaccgtttgagcgaagcgcatcgcaataaactcgaagagagcggtttgatcgtcaatattattaaagccagcgcctgatttccctccgcgcccgtatttcgggcgcacacgtctttctctgagatgattcttaaccctgctttaagagtttttacctgtttaacctgccctaaagtcgtaaaattactattagcgatataacaggaagtaactatcacctgcgtgatgaagtaacgcctgcgcgaccagctttcacggggaaaagaattaagtattcgattagtctatacttaacgtgtacatctttccgtgaatcgataattcaggagaaaggattatgaccttaaccagcaaaaaattagccgccgctgttctggcaatcactgtcgctatgtccctgagcgcatgctctaactggtctaaacgtgaccgtaacaccgcgattggtgccggtgccggtgctctcggtggtgcagtattaacggatggtagtacgctgggtacattaggtggcgctgctgtcggtggtattatcggtcaccaggttggcaaataactattatctaagccttcctcgatattgcgatatttaaacgcatttcaggtctgacatacgcacgtatataacacgagccacggcatttgccgtggctcatttattttagccgcctgccagtttgactttcatgcctttggtttcgagcagtgatttaattaaatcacgtttatcaccctggatttcgataatgccgtccttcacggccccgccgcatccacatttctttttcagctcggcagccagctttgtcagttcagcatcatccagatcaataccggaaataaggcagacccctttccccttacgtccgctggtctgacgctgaatgcgcacgataccgtcccccttcggacgttccactttggctttcggttcgtcgatacgcccgctctcggttgagtagaccagacgactgttggaatcggtcattacgccccctttttaagcgatgcgttgatagccttaagcgtctctgccgggtttgcagactgcgtcaccggacgtccaatgaccatatagtcaacgcccgccgccagcgcctgctcaggcgtcatgatgcggcgctgatcgcccacgtcgctgcccgcaggacggatacccggcgtaacgagtttaaaatcctggcccagcgctgatttgaaacgtaccgcttcctgcgcggagcagactacgccatccaggccgcactgctgcgtcagacgcgcgagacgttcggcatgttccgcaggtgacaacgtcacgccaaggtcgcgtaaatcattttcgtccatactggtcagcacggtgacggcgataagcagcggcgcgtcgttaccgaacggcaggagcgcctcacgggcagcggtcatcattcttgccccacccgacgcatggacgttgaccatccatacgcccagctcggcggctgcagcaacggcgtgggccgtggtgttcggaatatcatggaatttgaggtcgaggaaaacgtcaaagccgcgctgttgcagatcgcgaacgatttgcggtccaaacagcgtgaacatctctttgccaactttcaggcggcaatcgcgagggtcgataccatcgacaaacgccagtgcagcgtcacgcttattgtaatcaagcgcaacaacaacaggagaatccgtaattacgcgggaagtggaggatgtaacagacgtcatgaccagcccttttcgtctatgggcgcgcagcggcgcggaacagataaacggccagcattctacctgccgacgccgcaaattgacagaatccatttatctgcctgccaggccggcaaaccgcacggtgctcagaaaacgttaaataccatcagtatgttgtaactaaaatgaaggcttttaaaaaattactgcccgtccaggccgcggatgggcttgatggtggaccaggcccggcaggacggacaatgccagtagagcgtgtaggcggtaaaaccacacttctggcaacggtagcgcggtttgctgcgcacctgctcaccaaccatgtcgcgcagcaccatcaggctctctttcgcgcgcccttcttccgcgtcgttcaggtggtaatccatcagcttatggaagacccgcatggtcggatgacgctgaagctgtcgggtgatatagacctgcgcggtgtcgcccccctcatactgctcaacaacgtcagcaagcatcagttccgcggttgcgccggtattctcttccacgcagcgacgcagaaatgccacccactcttcccgcttgtccagctgttgatagcaggtttgcagcatttctagcgtttcactgaccagctctttgtcctggtcgataacccgcagcaggctttcaacggctttggcgtagtcgccattcgccataaaaacgcgccccatcatgatggagatacgggcgctgttgcggtccgcggcggcacctttcttcagcagcgccatggctttgtccatgtcgtcattgcccatctgctgaagggcaagctcacagtagaaatgggcgatctcaacgcgctgcttatctttacccagcttcaccagacgttcagccgtatcaatggctttctgccagtcgctggtggcctgataaatctgcaggagctgctgcagcgcgccgatgcggaaatctgtttcatccaccagctgcgcaaacatatcttccgcgcgatcgtacagccccgcagccatgtaatctcgtcccaactgctgtacggccagcagtcgttgatcgtaggtcagcgaggcgctttccatcagggtctggtgaatacgaatggcgcggtcaacctcgccgcgagagcggaacaggttaccgagagtgagatgggcttctacggtccccgtatcctctttcagcatgtcgaggaacaggtctaccgctttgtcctgctgattgctcaggaggaagttcacccccgcaacgtagtcgcgggagagccggttggcctcatcctgttttgtttgttgcgcacttctgcggcccatataccagccataggctgcggcgacaggcaaaagcagaaacaacaactccagcatcgttgattattccttcacgaccggcacgccagagctttccggcatgtcggacgcaggcgcaatgtgatgttcgagtcgtttgattttacgttcagcgcgcgcaagcgaaacacggacttttaaccagaacaaaccgcaaaccagccagccaatggcaaagcctgcagcaaataagaccgcgagcaggctcgacacgcgatactcgccctgagccagcagatagttaaacgtcacctgctgatcgttttgtgcacccaatgtgactgaaatgacaaaaatcgccaataccagtaagaaaatgagtaaatatttcacattacttcccgttatgtggttcaagcgaataaagtatgttcaacttaccgcaatcagccttataaactaccattttagtgacgggcgcgaaatggaaaaagtgacgcgccagtcatggatctatgggcaaaatgcgcaatatcaaccttcaggcgtccgtttggtccctttcggctatttcttctttctcttccggcggtggcgttagcgggccgcagaatcgttcagccagccaggtcgccagcataaccagcatccacgaaatgagcgtggcgacgaccaggtcccgtggccagtgcatccccagcagtaagcggctgcccatcactcccgtcgcccagaccagtaaaatcacgatggtgaccgttcgacgtctaggccaaagcagcccaacccccagcagcgcccagctggccgcaaacatggtgtggccggagggaaacgcgaacccggtctctttctgccagtgtttacgcaagaatttcgggatatcctgctgttccgcaagctgttctttcaccagtgcgccacgatctttacgctttaaagtgtagaactcatccaccggaacatggtgcgttttttccagccagacgacaaaaggacgcggctcctgaacgcgatctttcacccaggattttacgccctgaccgataaggatagcgccgccgaggatcgcaaagagcattagcgccgcgcgcagacgaaagcgcaggcaccacagaaaccaggcgcacaggaggacgtgggtgataattccccagggctgggtgaccgtttccgtaatccagtataacgttttcagccacgtggcgttctgcccgggctgccacatccaccctgaaagccatacggccaaaggcataatcagtaaaatggccgcacctgctgccgtacgtctggcgattgaatgcatgtcttctcctttttgctaagcgtcacaatcataactgaaatttgttcgctgggtggagatgtcggatcgtgcttttaacgttcatatcgcatggtgcccattaggcgaacctgctgagcttgtggcaaaataaactgatacagaaagcaaaacagggcacaggcacgaaacgtgtcagcctactctggagaatcacatgcagcttaaacgtgtggcagaagccaaactgccaaccccatggggcgatttcctgatggtgggttttgaagaactggcaaccggacaggatcatgtcgcactggtgtatggcgacatttcagggcagacgccggtgctgtcccgcgtccattcagagtgtctcaccggcgacgcgctgttcagcctgcgctgtgattgcggtttccagctggaagcggccctttctcatattgctgaagaaggccgcggcgtgctgctttatcaccgtcaggaagggcgtaacattggtttgctgaataaaattcgcgcctacgcgcttcaggaccagggctacgatacggttgaagccaaccatcagctcggttttgccgctgacgaacgtgacttcaccttatgcgccgatatgttcaagctgctgggcgtagacgaagttcgtctgctgaccaataacccgaaaaaagtggaaatcctgaccgaagccgggatcaacatcgttgaacgtgtaccgctgattgtcggccgtaacccgaaaaatgcccactaccttgataccaaagccgccaaaatgggccatctgctgaaagagtgatataaaaagcccggcacgcgtgccgggcttgtttcatcaatccagcatcttacgaatcacgtaatgtaaaatgccgtcgttctggtagtaggtcagctcggttgccgtgtcaatacggcaccgacaatccagcacctcggttttcccgtctgcccgcgttaacgttaccggcaccgttttacccggctgcaggttttgcaggccgctaatgtcaatctgctcttccccggtcagacccagcgttttacgcgtcacgccctgcgggaactcaagcggcaggatccccatgccaatcagattcgaacggtgaatacgttcgaacgattcggcgatgaccacccgaacgccaagcaggcgcgggcctttcgccgcccagtcgcggctggagccggaaccgtactctttaccggcaatcaccgccagaggcgtcccttcctgttggtatttaacggccgcatcatagatcgacacgacttccgtccccggcagatggcgcgtcatgcccccttccacgcccggcaccatttcgttacgaatgcggatgttggcaaaggtcccgcgcatcatgacttcatggttaccgcggcgcgagccgtaggagttaaaatcgcggcgttcgacaccccgactttgcaggtaacggcctgccgggctatcggctttgatgctccccgccggagagatatggtccgtcgtgacagaatcccccagcatggccaggatgcgcgcgccgtgaatatccttaagcggcgccggctcggccagcatctcatcaaagaacggcgacagacgaatataggtcgagtcatcctgccagccataggtatccgaacctgcaacgttgatggctttccattccggcgtgccttcaaagacctccgcgtactctttgcggaacatctcggtagaaaccttctcaacggccagcgcgatttcacgtgaagaaggccagatatctttcagatagacaggatcattcttacgatcgtgaccaatcggatcggtcaccaggttgatattcatgttcccggccagggcataagccaccaccagcggcggcgaagcaagccagttggttttcaccagcgggtgaatgcgcccttcaaagtttcggttaccggacagtacggcgccgaccgtcaggtcaccctgcttgatcgccgtttcgataggttcaggcagaggcccggaattaccaatacaggtcgtacagccgtagcccacgaggttaaagcccagctcgtcaaggtacggcgtcagtttggcctgagccaggtaatccgacaccactttggagcccggtgccagcgaggccttaacccacggttgaggttttagcccaagctctaccgctttcttagccagcagaccggccgccattaatacgctggggttggacgtgttggtgcaggaggtaatcgcggcaatcacaaccgcgccgtccggaagctgatactgatgtccgttcagaacatagtcgacgggacgatggtctttctgcgccacgttcacttcaagggcattgctgtcggcaaacgctttcggcacgtcggtcagcgcaaccctgtcctgcgggcgtttcggccccgcgaggctcgcttcgacgcttcccatatcgagttcaagcgtgctggtgaaaacaggctcatcgcccggattgcgccacatgccctgcgctttggtatacgcttccaccagcgcgacctgttcttcgctgcggccgctgaggcgcatgtactccagcgtgacgtcgtcaatggggaaaaagccgcaggtggcaccgtattccggcgccatattggcaatggtggcgcggtcggccagcggcagcgaatccagtccgtcaccgtagaattcaacaaacttgcccaccacgccgtgcttgcgcagcatctgggtgacggtcagcaccaggtcggtggcggtaatgccttcagacagttttccggtgagcttgaagcccaccacatccggaataagcatggataccggctggccgagcatggcggcttccgcttcaataccgccgacgccccaccccagtacccccagaccgttgatcatagtggtatgggagtccgtacccaccagcgtgtccggataggcgacccactctttatcctgcaattcgctccagacggctttacccagatattcaaggtttacctggtgacaaatgccggtgcctggcgggaccacgctaaaccggctgaacgcctgctgtccccacttcaggaagacgtagcgctcgtggttacgctccatctcgagacgaacgttttcaccaaaggcatcgtcatcaccgaagtggtcaacggtcacggagtggtcaatgacgaggtcaacgggggaaagcgggttaacctttgccgtatctccgccgagacgcttcacggcttcgcgcatcgcggctaaatcaactacggccggaacaccggtaaagtcctgcatcagcacccttgccgggcggtaggcgatttctctgtcggcatgggccttctcaagccaccctgccagcgcctggatatcatcgagcgtgacggattcaccgtcctgccagcgcaagagattttcaagtaaaactttcaaggacttgggtaaacgcgaaatgtccccaagcgttctggcagccagcggcaggctgtagtaatgccaggttttattttctgcctgtaatgtgtccttactggcttcgcgtagggttaacgacataagctcctccttaatcacagagatgtcccgacaatcatcagggctgtaattaaagataacacaaagatgtcgtaacgttttgataacaacccaaattgataaatttcggattggtccaccagggggaaacaaaaaaccccgccgtagcgaggttttacaatttagtggagcgccagccagatgagctgactccagaacagaatcgacacggtaaaaacgccgatccacgaccagtatttgtgagacgtcatgttattcatcatagggacaccaggcattatttataaaaattccgaggttgttcctcagagctatattgctgatgtgtatttattaaagagtacaaaagtgcagagtcgatattcagactatttgcatcattacgcaataaactaaattattgttttttgggttcgtcttctgcgaacacatcaataaacgcttgctgctgcggcgtcagtttccaggacgcaggtacaacagttgcaggtgctttacgccctctgtggccgttgtcacgatgctgacacatctgttttaccgaagcggtacgtaccgtcactgccatatttaaccccaatatctccaggccaggagagcaacagccacccaaaacaaggcggagacgagaaagaccgccagccaggctttacgcttgagcgcaggatccctttgcggttcttcacttcctgaaggcattgctaacctcatacaatcgacatcgcttatcatttaggaccaaacaattggtacaattaatcatctgttgagataaatcctaaagaaactttagccgaaaagccagtgaatttacgcaccgggaggtatgaaatattcaatcttttgaccagaaataaattattgaaaagaaaaatttgcggaggcgtaaattagtttctacttttgtcgccaattcacgacattaaaaccttacaaagcaaatggctaatgacattatatggcagggaaagcagatgatgataattctaatttagctttgaggcgttatttcggtatctttccctgggggaaagataccgggtgtgattatttttcggggagtttgatgtctttaaacatctcttcaatatcttcatttgagcgtaatgccacggcggtatcaaccacgtcacgcgttaaatgaggggcaaagcgctgaataaaatcatacatatagctgcgcaggaaggtgctgcggcggaaaccaatttttgtggtgctatggctgaaaacgtcgtgcgcatcaagacgcaccaggtcagggtctgacaccggatcgaccgccatgctggcgatgacgcccacgcccaatccaagccggacataggtcttaatcacgtcggcatcggtcgcggtaaagacaatgcgcggcgttaaccctgcccggttaaatgccgtatcaagctcggaccggccggtaaagccaaacgtataggtcaccagaggatactgggccaactcttcgatagtgaccgaccctttacccgccagggggtgatcgggggtcaccacaatagaacggttccagtggtagcacgggagcatcaccagatcgtcatacaggtgaagcgcttcggtggcgatggcaaagtctgcattccccttagagacggcttcagcgatttgcgttggcgagccctggtgcatatgcaacgagacgcgaggataacgctcgataaagcctttgatcacgccgggcagcgcatagcgcgcctgagtatgcgtcgtggcaatatacagcgagcctttatccggccaggtatgctcccccgccacagacttgatcgcatcgactttagagaggacttcacgcgcaatgcggatgatttcctgccctgcaggcgtcacctgagtgagatgcttaccgctgcgggcgaagatctgaatgcctaactcatcctccagcatacgaacttgtttgctgatgcccggttgcgaggtatagagcccctcggcggtagaagagacgttaaggttatgattcaccacctcaacgatataacgaagctgctgtaatttcatgccagaccatccgatttagcgcatgcggtcattcgcttaagacgatttaataataagaaacaggttaactataaccactatatcatttatagcctgactgtatagtacggaacaaaaaataataacaaggtaataaaaaagggccggaaatccggcccttttacaggtaagttacggttaggaaagattatttcttgccttcaacccatttgccatcgacaaagaaggctgaccatccggtcgctttaccctctttctctgccgcaacatactgctgctttgttttacggctaaaacgcaccacggttttgttgccttccggatcctgctgcggcgcatcggccagataacgcagtttctccggcagacgatcgcggaagcgatatagctcttccaccagcggcgcgcgggtttcgcgcgatttcgggaaggtgttggcggccaggaagacacctgccgcgccgtcacgcagcacgaagtacgcgtcggatttctcacacggcagctccggcagcggaaccggatcttccttcggcggggccacttcaccgttacgcagaattttgcgcgtgtttttacattcgtcgttggtacaggccatgtacttaccgaaacgccccattttcaggtgcatttcagaaccacacttctcgcactccacaatcgggccgtcatagcctttaatgcggaactcgccctcttcaatctcatacccgtcacacgttgggttattaccgcacacgtgcagcttgcgttttggatcgatcaggtagctgtccattgccgtgccgcattttttgcagcggcgcttggcacgcagagcgttcgtttccgcatcgtcaccttccagcacgttgagaacttcgttctccggcaccaggttgatggtggttttgcagcgctcttttggcgacagcgcatagccggagcagcccaggaacacgcccgtggtggcagtacggatccccatcttgcggccacaggttgggcagtcgatgctggtcagtaccatctgattaggcagcatgccgccctcttcagggtctttctccgccttttcaagctggtcggtgaaatcgctgaagaagctgtcgaggacctttttccattccgcctggtggctggcaacctggtcgagactgtcttccatttgcgcggtgaaatcgtagttcatcagctcgcggaagttggcttccagacgatcggtgacgatctcacccattttttccgcatagaaacgacggttttcaacacggacgtaaccgcgatcctgaatcgtcgagataattgacgcgtaggtcgacggacggccaataccgcgtttttccagctcttttaccagagatgcttcactgaagcgtgccggtggcttggtgaagtgctgagccgggatcagctcaaccagagacagttcatcacctttgttcaccgcaggcagcgttcggtcttcatcacctttacgcagcgcaggcatcacttttgtccagccgtcgaaacgcagaatacgaccgcgcgccttgagacggaaatcacccgcgccaacggtcagcgtggtggagtcgtactgggccggggtcatctggcacgccacgaactgacgccagatcagctgatacagcttctgcgcgtcgacttccatatctttcagcgattcagccagcacagagacgtcagaaggacgaatcgcttcgtgcgcttcctgagaattctctttgctggcgaactggttagcgctttccggcaggtatttctcaccgaagttgtcgctgatgtagccacgcaccatgttgaccgcgtcctgactcaggttggttgagtcggtacgcatgtaggtgatgtaacctgcttcatacaagcgctgggccatcatcatggtcttcttcacgccgtaacccagacgggtgctcgccgcctgttgcagggtggaggtgataaacggcgcaccaggcttgctgctggtcggcttgtcttcacgttccagcacctgatagcgtgccttttccagcagcgccacggcggccatggtctggtcgcggttttccgggcggaaaggcttatcgttctggtggcttacctgcagcggcagagcgtcaccgcccggcgtggtgacattggcatcgacttcccagaactcttccggcacgaaagctttaatttcgcgctcgcgctcaacgaccagacgcacagcgacggattgcacacgacctgcggacaggccacgggcaatctttttccacagcagtggagaaaccatgtagcccacaacgcggtccataaagcgacgcgcctgctgggcgttaacacggtcgatgtttagctcgcccggcttctcaaacgcctgacgaatcgcattcttcgtaatttcgttaaacactacgcggctgtagcgtttgtcatcacccccgatcacttcccgcaggtgccacgcaatggcttccccttcgcggtcaaggtcggttgcgagatagatgtggtctgctttttcagccagctgcttcagctcgttaacgactttttctttccctggaagcacttcatattgtgcatcccagttatgccatgggttaacacccatgcggttgacaagcgcgctacgttcatcctttttaggctttttagcccctttggtggaggtagagtctgcgctctttttgctggctgagccactggtcggcaaatcgcggatatgaccaacgctggacttaaccacgtagtcattacccagatacttattgatcgttttggcttttgccggggactcaacgatgacgagagctttacccatattcacctttacctaatttaattcttccaggaatacgccgcacgttgatttcccttccgctgacgacgagccaatgatattgcgactgcgtcaggagatatcaacccctttgtcttaccgggcgttaaagaaaagacgcccaggtgattgagttctcgggtatttttctcacatctcgtgtaattcgtgacgaattcccggttgaatgtcaagcaattctgttgccagaatgacgaaagcgcacactctacctgataaaattcgttacgcaactttattagcatgcaaaagcaaatcctgccagccaggcccctgcaccttatcctctcacattacagggaaaatttgcccccaaagcgccctcggcgtagactattgtcactgtttaaggagtggattatgcagaatacgacccaacctattgaccgagcctctctgcttatcgaagcaaacaagcttattcgtgaccatgaagatacgctggcaggcattgaagccaccggcgttgagcagcgtaatggcgtgctggttttcagcggcgaatacttccttgatgaacagggcttaccgaccccgaaaagcaccgccgtgtttaacatgtttaaatacctggcacatacgctttccgagaaatatcacctggtcgattaacgcaaaacgcgaggcataagcctcgcgtttttgtttacagcagcggtttttgtccccgctgtagccagcggagcagcaggcggtccgcgctttctgccgcactgttggtaaagcggtcaaggagtcgcttgcgctgggcaaagcggacgcccaccagttcccggccttccatcaggttgagcagcagatcgtcgctggttccgacttcatccaccagccctttctcctgcgcctgaacgccgtaccagtgctcacccgttgcgacctgctcaatgtccagcgtcgggcgcatacggtgcacaaagtctttaaagagatgatgcgtttcgttgagatcctcacggaatttttggcgcccttcttccgtgttttcccccagcagcgtcagggtacgtttgtactgacccgcggtgtgaagctcgatatcaatctctttatttttcaggaagcggttaaagttcgggatctgtgcgaccacgccgatcgagccaataatcgagaacggtgcggccacaattttgtccgccacgcaggccatcatgtagccaccactcgccgccactttatctacggccacggtcagcgggatctgtttttcacgcaggcgctgcagctgagaggccgccaggccgtagccgtgcaccacgccccccgggctttcaagacgaacaacgacctggtcctgcggcgtcgccacggccagcacggcagtgacctcttcgcgcaaagacgcgacttcatgcgcatccatgctgcctttaaaatcgagcacgtaaacccgtggcgtgaccttatcctgtggcgtattgagcttcgcctttgcctttgccgctttggcttcctgcttatgctttttcttctgcgctttgagccacagcttctgttgatgactatcaagcagggccagagacatctcttcctgcatctctttatactgctcgctcaggcgggtgatgcgtaactccccacgctgacgcttgcgctgcgtcaggttgacaatcagaacggcaaccaccgcaatggcaatcaccaccgtcgcgattttcgccaaaaacaacccatattgagaaagtaattccacgcgttccaccttgatttaaccacgaatctttcacggcagtgtacaacaccccctgcccatgcgtctcgctcgtgacactacctctgcgaggcgccttcaggaatccccggtctggcgtttaaatatttgcaaattgttaattttacagcaatgcgtcctgtagactgattgaattatcaggcgaattcgggcataaagccgaaaagtcacaaaagaaggcgtgtttaagtcaccgtgcgccgaggagtcaccttgcattatcaaccgcaaaaaaatctgctgcagaaccgcatcattcttgtcactggggccagcgacgggattggccgtgaagcggcgctgacctacgctgagtatggcgcgagcgtcatcctgaccggccgcaacgaagaaaaacttaaaggggtggcgcaggagattgaagccgcaggtgggattcctgctcgctggtacacgctcgatctgctcacctgcacgcccgcgtcatgtcaggagcttgctcaccgcatcagcacccattacccgcgcctggacggcgtactgcataatgccggcttgcttggcgaagttcgcccgatggatgaacaggatcccgagatctggcaggaggtcatgcaggtcaatgtcaacgggacgtttttcctgacccaggcactgcttcctttattactcaaatcggattcgggttcactggtgttcacctcctccagcgtaggccgtgaggggcgtgcaaactggggtgcctatgccgtatcaaaattcgcaaccgagggcatgatgcaggtgttggcagaggagtaccagagtcgccatctgcgcgtaaactgcattaacccgggcggtacgcgcaccaaaatgcgcgccagcgccttcccgacggaagacccgcagaagctgaaaacgccggcagacattatgccgctctatctctggctgatgggcgacgacagccgccgcaaaaccgggatgacctttgacgcccagccgggccgtaaaccaggaatctcgcaatgagtgaagaacgtcatcagcagcgccagcagcgtctgaaggaacaggttgatgcgcgcgtcgcggccgctcaggacgagcgcgggatcgtcatcgtctttaccggcaacggcaaagggaaaaccacggccgcattcggcacggcgacacgcgccgtcggccacggtcagaaggtcggcgttatccagtttattaaaggtgagtggcctaacggcgagcgtaatctgcttgagcctcacggcgttgagttccaggtgatggcgaccggctttacgtgggacactcagaaccgcgaaaccgataccgcagcctgtctggccgtctgggagcacgccaaaagaatgctggccgatccctcactcaacctggttctgctggatgagatcacctatatggtcgcctacgactatttgccgctggacaccgtgcttaatgccctgaaaaaccgtcccgcccatcagacggtcatcatcacggggcgcgggtgtcatcgggatattctggagctggcagataccgtcagcgagctgcgtccggttaaacatgcgtttgatgcgggcatcaaagcgcaaatagggattgattactaaagaaaaaagcccggtgtcttcaccgggcttttacattaaccgttgttattacggctgccagagcggcggttgctgctcacctggctgtgacgcttcaccgcacggcgaatctggttcgccttcatgcggcgacgatctttctccaccgccactttagaggtggtttccggcgtcaggccgaccagctcgcgcaggtagttggtctgggtcagatccagttcggtatatcccccacgcggcaggccttttggcagcaggatgtcgccgtaacggacacggatcaggcggctaacctgcacgcctaccgcttcccagagacgacgcacctcgcggttgcggccttcggtcagggtcacgttataccactggttgatgccttccccaccggtaaatttgatggttttgaacgccgcaggaccgtcttccagctgaacgccacgcgacaggtcgcgcagtttattctcgtcaacctggccgaacacgcgcacggcgtattcacgttccacttcacggcttggatgcatcagacggtttgccagttcaccatcggtggtaaacagcagcagaccgcaggtattcacgtccagacgaccaacggcaatccagcgagcgccacgcagtttaggcagacggtcaaacaccgtcgggcgaccttccgggtcattgcgggtacacagctcgccttccggcttgtagtaagccagcacgcggcagatctgctcagcggactctttcacggagataagatgaccgtcaatacggatcttcagccccggtacgatttctacgcggtcacccagcgtggcgattttaccgtccacactcacgcggcccgcttcaataatggcttcgatttcacggcgtgaaccgtggccggcacgcgccagcactttctgtaacttctcgctcattgagcttcctcaggtgtcgccttcacaggcgtcgaatcaggtcaaaagagggccgagccctgctttgatggccgcgtagtatatctgcttataccattacaagaaaggctttacatcgcccacgccttcacgaatcacttccggtgcatcttcggttaagtcgaccacggtggtcggctgctggccgagataaccgccgtgaataatcagctcgaccaccttctccagacgatctttgatctcttccggatcggactcggtaaactcgctgccgggcagcatcagcgaggtagacagcatcggttcaccgagggtttccagcagcgcctgcgcaatcgggttcgacggcacgcgcatgccgatagtcttacgcttttcctgcagcaggcggcgcggcacctctttcgtccctttcaggatgaaggtgtagttgcccggcgtgttgttcttaatcaggcgaaacgccacgttatcgacataagcataggtcgacagctcagagagatcgcggcacatcagggtaaagttatggccgtccggcaactggcgaatacggcaaatgcgttccatcgcccctttatcttcaattttgcagcccagcgcgtagccggaatcggtcgggtagacaatcacgccgcctttgcggacgatctccacggcctggttaatcaggcgtggctgcgggttatccggatggatatagaaaaactgactcatacttccctctcttcaaattgctgcggctgttcccagagctgccagaccggctcaacgccagcgggcagccagagcttgcgccccagttcgatccaggcgcagggctgatggaaatcagagccctgtgagccaagcaggccgtactgtcgggcataggtcgcgagctgcgcgcgctcattgggcgcctgctgacactgggcgacttccatcgcctctccaccgttttcggcaaagtgcgccagcagccttttcagccatttagcagaaagattataccgccccggatgggccagcacggccttaccgccagaatgatgaatcacatcaatagcttgttttattgtacaccactgtggcggaacgtatccggttttcccgcgcgccagatactttttaaagacatccgccatcgtcgtggctttacccgcctctaccagaaaacgggcgaaatgaccgcgcgtaaccgccccgccgtttgccagcttttgcgcaccttccagcgcgccaggaatatgtgccttttccagacgctcgccgatcatctctgcgcgctggttgcggcgcgttttttgttcttgcaaaaactcaataagtgccggatggtctatatcgatgttcaggccaacgatatgaatctcatggttttcccagacggtcgaaatctcgacgccggacaccagattgagtgccagcccgcagcgggcaatctcggcgcgcgctgccggaatggcatccgtcgtatcgtgatcggttatcgccagcgtgccgatgcgcatttcaacggcacgatgaaccagggcttcgggtgtcagcaggccatcagaggcctgagtatggctgtgtaaatcataaataatcgcgtaggtggtatcgctcaaagcacttcccataacaggttgaagacatccgaaaccgccatgataccgacttaacgtgaaattctgaaatcaagggttgacaacacgccaccgaactagttaactagtacgcaagttcacacgagaaaggtatctgaaaatgacagcacatttcactctgcacggttggtggcgtacttcctgatcttcgggcagtgtcacgcgtctgcgaaatgcaaacagatacccgcccgctactcagcgggcttttttttgaacagaataaatgagaacaccaacatgcaaacagccaaaccccatctcgaattgctgacctgcgaggcggcctatcgccacaacccgaccgcgctgtttcatcaggtgtgcggggcacgcccggcaacgctgctgctggaatctgcggacatcgacagcaaggacgatctgaaaagccttctgctggtcgacagcgcgttgcgcattaccgccttaggtgacactgtcactattaaggctttgtcagacaatggcgcatcgctgctgccgctgcttgatgccgccctgccttcaggcatcgaaaacgaacgtcatccagaaatgcgcattctgcatttcccgccggttagccaactgttagatgaagacgcgcgcctctgttccctgtccgtctttgatgccttccgcctgctgcaaaacctggtcaccgttccgcacgatgagcgtgaagcgatgttctttggcgggctgtttgcttacgacctggtcgcgggatttgaagatttgccggaaaccgagcagggcaatcgctgcccggactactgtttctatctggccgaaaccctgctggtgatcgaccatcagaaacagtacacccgtatccaggccagcctgttcacgccttcgaccgctgagaaaaaccgtcttgagcaccgcatcgcgcagcttcagcagcagatgacggaagcgccacctgcactgccggtacagcgcgtggaaaaaatgacctgcgatgtgaaccagaccgacgatcagtacggtgccgtggttcgccagatgcaaaaggcgattcgcgccggggaaattttccaggttgtaccgtcccgtcgcttctctctgccctgcccgtccccgctggccgcttacgacgtgctgaaaaagagcaacccaagcccgtacatgttctttatgcaggacaatgacttcacgctgttcggcgcctcgccggaaagctcgctgaagtacgacgccaccagccgccagattgaaatttacccgatcgccggaacccgtccgcgcggacgtcgcgcagacggctcgctggatcgcgatctcgacagccgcatcgagctggaaatgcgtaccgaccataaagaactctccgagcacctgatgctggttgacctggcgcgtaacgatctggcccgtatttgcaccccgggcagccgctacgtggcggacctgactaaagtcgaccgctattcgttcgtgatgcacctggtctcccgcgtggtgggcgagctgcgccacgacctcgacgtgctgcacgcctaccgcgcctgcatgaacatgggcaccctgagcggtgcgccgaaagtgcgcgccatgcagctgattgccgccgccgaaggacgccgtcgcggcagctacggcggcgcggtgggctattttacggcccacggtgacctcgatacctgcatcgtgatccgctccgcctatgtcgaagacggtattgccaccgtccaggcgggtgccgggattgttcttgattctgttccgcagtctgaagctgacgaaacgcgcagtaaagcacgtgcggtattgcgcgccatcgttaccgcacaccacgcacaggagattttctgatggctgacattctgctgctcgataatatcgactcctttacctataacctggcagatcagctgcgtgcgaatggccataacgtcgttatctatcgcaaccacgtcccggcgcagaccctgattgaccgtctggcaaccatgcaaaacccggtgctgatgctctcccccgggccaggcgcaccgagtgaagcgggctgtatgccggagctgctgacccgcatgcgcggcaagctgccgattatcggcatctgtctcggtcatcaggcgattgttgaagcctatggcggctacgttggccaggcaggtgaaatcctccacggtaaagcgtccagcatcgaacatgacggccaggcaatgtttgccgggctgccgaatccgcttccggtcgcgcgctaccactcgctggtcggcagcaacattcccgccgggctgacgatcaacgcctcgtttgaagggatggtgatggcggtacgtcacgacgcggatcgcgtctgcgggatgcagttccatccggaatccatcctgacctcccacggcgcccgcctgctggaacaaaccctggactgggcgttacagaagctggagcagaccaacaccctgcagccgattctggaaaaactgtaccaggcacaaaccctgagccagcaggagagccaccagctcttctccgccgtggttcgcggtgagctgaagccagaacagctcgcagccgcgctggtgagcatgaaagtccgcggtgaaagcccgcaggagatcgccggtgccgccacggcactgctggaaaatgccgcaccgttcccgcgcccggactatccgtttgccgatatcgtcggcaccggcggtgacggcagcaacagtatcaatatttcaaccgccagcgcctttgtggccgcagcgtgtggcctgaaggtggcgaagcacggtaaccgcagcgtgtccagccggtcgggctcgtctgatttgctcgcggctttcggcattaatctcgatatgaacgccgaacgttcccgtgaagcgctggatgacctgggcgtctgcttcctgtttgcgccgaagtatcacaccggtttccgccacgcaatgccggttcgtcagcagctgaaaacccgcacgctgtttaacgtgctcggcccgctgatcaacccggcccatccgccgctggcgctgatcggtgtctacagtccggaactggtcctgccgattgccgagaccttgcgcgtgctgggttaccagcgtgccgccgtggtgcacagcggcggaatggacgaagtgtcactgcatgcgccgacgctggtagccgaactgcgcgacggtgaaatcctgagctaccagctggaagccgctgactttggtttaactccgtatcaccaggaagcgctggcaggcggtaccccggaagaaaaccgtgacattctgacgcgcttattacaaggtaagggagaggtcgcccatgaggccgccgttgccgccaacgtcgccatgctgatgcgtttgcacggtgaggaagacctgaaggccaacgttcaaaaagttctggatgtactgcgctccggtgcagcttacgatcgcgttaccgcacttgcggcaagagggtaaagaatgcagaccgttttagcgaaaatcgttgccgataaggccatctgggtggaagcccgcaagcaacagcagccgcttgccagtttccagaacgacgtcgtcccgagcagccgtcgtttctatgacgccctgcagggtgcgcgcaccgcgtttattcttgagtgcaaaaaggcgtctccctcaaaaggcgttatccgtgacgatttcgacccggcgcgcattgccggtatttataagcatcatgcctcagccatctccgtgctgacggatgagaaatattttcagggcagcttcgattttctgccgatcgtcagcggcatcgcgccgcagccgatcctctgtaaagacttcattatcgatccgtatcagatttggctggcgcgcttttaccaggccgacgcctgcctgctgatgctctcggtgcttgacgacgagcagtaccgccagctctctgccgtcgcgcacagcctgaaaatgggcgtgctgaccgaagtgagcaacgaagaggagctggagcgcgcgattgcgctggaagccaaagtggtcggcattaacaaccgcgatctgcgtgacctgtccattgacctgaaccgcacgcgccagctggcgccgcggctgggctctggcgtcacggtcatcagcgaatccggcattaacagctacgcccaggtgcgcgagctgagccacttcgccaacggtttcctgattggctccgccatgatggaacatgacgatctcaatgcggcagtacgtcgcgtgctgctgggtgagaacaaagtctgcggtttaacccgcgaacaggacgcccaggccgcgtatgaagccggagcgatttatggcgggctgatttttgtggattcctctcctcgcgcggtcagcgaagagcaggcgcgtaaggtcatcgccgcggcaccactcagctatgttggcgtgttccgcaatgcggatatcgccgaggtggttgaaaaagccgacgcgttatccctgagcgcggtgcagcttcacggcgatgaagatcaggcctatatcgatgccctgcgcgccacgctggcaccgcaggtacagatctggaaagcgcaacgcgttgacgatacgttgcccccgcgtaacctgaaccacgtggataaatacgttctcgataacggtcagggcggaaccggccagcgttttgactggtccctgctgaacggcgaaaagctggacaacgttctgctggcgggcggattaagcccggataactgtgtagaagccgcgaaaaccggctgcgcaggcctcgatttcaattcaggcgtagagtcccagccgggtagtaaagatgccagcaaactggcctcggtttttaaaactctgcgtgcatattaaggaagagaagatgacgacattacttaacccgtattttggtgagttcggcgggatgtacgtcccgcaaatcctgatgcccgcgctgcgccagctggaagaagcgtttgtaagcgcacagaaggatccggcgtttcaggctgaatttaccgacctgctgaaaaactatgcaggccgcccaacggccctgaccaaatgccgcaatctgacggaaggcacgaaaactacgctgtatcttaagcgtgaagacctgctgcacggcggcgcgcacaagactaaccaggtgctgggccaggcgttgcttgcgaagcgtatgggcaaaaccgaaattatcgccgaaaccggcgcaggccagcatggcgtggcctcggcgctcgccagcgccctgctcggcctgaaatgccgcatctatatgggggcgaaagacgttgagcgtcagtctccaaacgtcttccgtatgcgtctgatgggtgcagaagtgatcccggtgcacagcggctccgcgacgctgaaggatgcctgtaacgaagcgctgcgcgactggtctggcagctacgaaaccgcgcactatatgctcggtaccgcggcgggcccgcacccgttcccaaccatcgtgcgtgagttccagcgcatgatcggggaagagaccaaagcgcagatcctcgaaaaagagggtcgtctgccggatgcggtcatcgcctgcgtcggcggcggatctaacgccatcggtatgttcgcagactttatcgacgacacccgcgtgggtctgattggcgtcgagcctgcgggtcacggcattgaatcgggtgaacacggcgcgccgctgaagcatggccgcgtggggatctacttcggcatgaaatccccgatgatgcagaccgatgaaggccagattgaagagtcttactctatctccgctggcctcgacttcccgtccgtcgggccgcagcacgcctatctgaacagcaccggtcgtgcggactatgtctccattaccgatgacgaagcgctggaagcgttcaaaacgctgtgccgcagcgaagggatcatcccggcgctggaatcttcgcacgctctggcccatgcgctgaaaatgatgaaagacaatccggaaaaagagcagctgctggtggtcaacctttccggacgcggtgacaaagatatcttcaccgttcacgatattctgaaagcacgaggggaaatctgatggaacgctacgataacgtatttgcagaactgaaatcccgccaggaaggcgcgttcgttcccttcgtcaccctgggcgatccgggccctgaacagtcgctgaagatcatcgacaccctgattgaatccggtgccgatgcgctggagctggggatcccgttctctgacccgctggcggatggcccgactatccagaatgcgacgctgcgcgcgtttgcttcgggcgtgacgccaacccagtgcttcgaaatgctggcagcgatccgtcagaagcatcccactatcccgattggcctgctgatgtacgccaacctcgtgttcaaccgcggtatcgatgaattttacgccgagtgcgcacgcgtgggcgtcgactctgttctggtcgccgacgtgccggtcgaggagtccgcgccgttccgccaggcggcgatgcgtcacaacgtcgccccgattttcatctgcccgccgaacgccgatgacacactgctgcgccagatagcctcttacgggcgcggttacacctacctgctctcccgcgcaggcgtgaccggtgccgagaataaagcggccctgccgctgcatcatctggtggaaaagctggccgagtaccatgccgcgccgccgctacagggctttgggatctcttctccggatcaggtcaccgcggcgattgacgcgaaggctgcaggtgccatttccggctctgcgattgtgaagatcattgagaagaacgtggacaagcccgagcagatgctggccgagctgaaggcgtttgtgaccgccatgaaggcggcgacgcgtaaagtctgacccctccaccgtctggcatccctgccagacggttagcctttattccccgtcttcaacaaagaatgacatcaaaattgatcctatcgatattttcggtgtgaatggcttttcaaactgtcatgtaagcgtatgatctggactcttttttatctttaatccttctgagttcagaggcttattcatgtcatggcaatccttcaaacaggcttacctggttaagttctggtcacccgttccggccgttatcgcggcaggcattctctctacttattattttggcattaccggcaccttctgggccgtgaccggcgagttcacccgctggggtggtcaattgctgcaactcgctggcgtgcatgccgaagagtggggttactttaaactcattcatctggacggcaccccgcttacccgcatcgacgggatgatgattatcggcatgttcggcggctgtttcgcggccgcgctgtgggcaaataacgttaagttgcgtatgcccaaaagccggatccgcattttgcaggcggttgtcggcggcatgattgccggtttcggcgcgcgtctggcgatggggtgtaaccttgccgccttctttaccgggatcccgcagttttcgcttcacgcctggttctttgccgtcgccacggccatcggctcttactttggcgcaaaattcaccctgctgccgctgtttcgtattccagtgaaaatgacaaaagtcagcgcagcgtctccgttaacccagaagccctctcaggcccgccgccgtttccgcctcggaatgctggtctttttcgccatggtggcatgggcgctctgcaccgccctgaaccagcctaagctcggtctggcgatgctgttcggtgtgggttttggtctgctcattgaacgcgcgcagatctgcttcacctccgcgtttcgcgatatgtggatcaccgggcgcacgatgatggcgaaggcgattatcgccgggatgggggtcagcgccatcggcatcttcagctatgtccaactgggcgtcgaaccgaaaatcatgtgggccggtcctaacgcggtcattggcggcctgctgttcggcttcgggatcgtgctggctggcgggtgtgaaaccggctggatgtatcgcgccgtcgaaggccaggtgcactactggtgggtgggtctgggtaatgtgattggctcgacgatcctggcgtactgctgggatgacgtgtctcccgtcctggccacccgctgggacaaggtcaacctgctgaataccttcgggcctctcggcggcctgctcgtcacctacgccctgctgttggtcgcttttttactggtcgtcgcacaggagagacgtttcttccgccgtgcgggcgttaaaacagaaacgcaggagaatgcagcatgaaagagatcgtgcctgattatcgtctggatatggttggcgagccctgtccatatccggcggtggctacgcttgaagcgctgccgcagcttaagaaaggtgaaattctggaggtggtcagcgactgcccgcagtccatcaacaacataccgctggatgcgaaaaaccacggttatacggtgctggatatccagcaggatggcccgaccattcgctatctgattcaaaaatgatcgctaagggcctcgtcaggggcctttatcgtattgaattataagagatcttgatccacggcaaaaaggttatttatgacttaagtaaaatctcatttcccttttgaaggaggttttcgcggtttgatgtatttacgagctttactggtcttcgccttattgattcccttccacgcgctgtccctgaatttctcttctactttcctgcgtcttaattgtccgcaaagaggacttgtcgaggttattctgcacgtttatgaccacactcaggaacggtggcgcggccattttgaaaccggtgcggggcataaacgtgcgggtgataccgaaatgatcccgtttgccaacggcgatattctcttccattccgtatccagcgacgctttcagctatttatatgatggggaaacgatcctgaggcactgcgtaaagctcgatgagcggccggtttatccgtcgttttgacgtgagcaaagcaaactggccaccctgtggccagtttgacggggaatcagaaacgataacccgcagagaacataaacacccacggatccaggcgagtgctgatactttgctgctggccgcccgccttgaagcgtacgtccgtatcaatatccatataccagaccgaggcgttgatcagccagtcgcggttaatcagataatccaggccaacctgccccgccatgccccacgaatctttcaggctgagatccgtcagacccgcctctttaccggtatcgttgaatttctcatcaaagaaggtggtgtagttcacaccggcgccaatatatggacgcaccttgctgcttgagtcgccgaagtaccactgcgccatcagcgttggcggtaaatggtgaaccgtggcgatatcaccggttggcccgaggcccacgcgatgacggaacggcgttgcagccagaagctcaacgcccacgttatccgtcaccatataggtgaaagttaaacctaactgggtgttattactgacgttaaaaccgcccattcccagcacgttatccgaaccttcagttgggcgagccgtagccgaaccggcacgaataaagaattcgcctgcttcatgcgcatacgcgccgccagagagactgcttaatacaagggctgccaccgctaattttttcatatccgctccatcgttgtggttttaatcgcggatgagaatatactcacaaaagagtaataagtgatctgccacagatcacattaaaaccagtaacttaacattcattgatctggattaattttttgttacgcacttaaaaccaataagttgtttccatgtcaatttttggcatttcacggttacaaaattttcccttttccccctcttgctcttcctctggcggctggataatttatcgctctcacaaattgatttgatgcgttcatcttttgcaggtgtgccatgagtgatatcaacccgtgcatgacgtgcggagcctgttgtgcgtattttcgagtctctttctactgggccgaagccagcgatggcggtggtaccgttccggttcatcttaccgagccgttaaccccctttttgcgctgcatgagcggcacgaaccaaaagcaggcccgctgtgtggcgctccagggtgagcctggggtctcgacccgatgttccatctatgaggatcgccccagcccgtgccgggaatttgccatgtcgggggaagatggccaggtcaacgaagcctgtaaccgcgcccgcgcgcgggttggattaccgccgctttacaaagatatgcttttccatacaagccttgatgctgccacagcaggtgcatccggtgtacaattgccggctaattaacacctgcaatactcaaggagagtgcatgtctatcacggcgaagtctgtctaccgtgacacgggaaactttttccgcaatcagttcattacctttttactgatcgcgttgctttgcgcctttatcacggtggtgctgggccatgccttctcaccgagtgaagaacagattgccagcctgagccagggcgaccatcttgcgggtagcgtggggttgtttgagctggtgcaaaatatgacgccggagcagcagcaaatcctgctgcgcgcctctgccgcgtccacgttctcaggcctgattggtaatgcaattctggcgggcggcgttttgctgatgattcagctggtatcggcgggtcaccgcgtcagcgccttacgcgcgattggtgcgagtgcaccggtcttacctaagctgtttatcctgatctttttaaccacgatgctggtgcaaatggggattatgctggtcgtggtgccgggcgttttactggctatcgtgctcgcatttgcgccggtgatggttgtgcaggataagatgggaatttttacagcgatgcgcagcagcatcagactgacatgggctaatatgcgtctggtggcgcccgccgtgatcggctggctgctggccaaaacgctgctgttattgtttgcgccgaattttgcggtattaacgcctaacgtcggcgccgtggtggcgaatacgctgagcaatctcatttcagcggtactgctcgtctatctgttccgcctgtatatgttaattcgtcagtaatcccgaggcggggggcatctctgtctcccgccccgctcagaagatggaatcacagaatgaagcagtttcttgattttttaccgctcgcggtgtttttcgctgtctataagttgtacgacatttttgctgcaacaaaagcgttaatcgttgtgaccgccgttgtgctgatctacagctggattcgctatcgcaaagtcgaaaaaatggcgcttattacgttcatcttagtggcggtgttcggtggattgaccattgccttgcatgatgttgaatttattaagtggaaggtgactgttatttatgcgttgtttgcagcagcattactgttcagtcaatggttcatgaaaaagccccttatccagagcatgttaggtaaagaactaacgctgccgcaggtggtctggtcgcgtctgaatactgcctgggcaatcttctttattctctgcggtctcgctaatatctatatcgccttctggctgccgcaggatatctgggtcaactttaaggtctttggcctgaccgcgctgacgcttatcttcacgctgttaagcggcgtatacatctatcgtcatatgccgcaggacgacaaccactgattactgactgaccagaacgtcaacgacgtgcgttctggtctattctctccgtacgcgaatcatagtagcatcccgcctgaagtcttccgttacgagttaaaacaatgacaacaactaacgcccctcagggcgaactggttttacgcacactggcaatgcccgctgacaccaatgccaatggcgatatttttggcggctggctgatgtcgcagatggatatgggcggcgcaattctggcaaaagagatcgcccacgggcgcgtggtcaccgtgagggtggacggcatgaccttcctgcgcccggttgcggtgggtgatgtggtttgctgctacgcgcgctgcgtgaagcgcggtaatacctccatttccatcaacatcgaagtctgggtgaagaaagtctcttctgagccgattgggcaacgctataaggccactgaagcgctgtttatttatgttgccgtggacagcgagggtaaacctcgtcaacttccgcaggcctgatcgacaggcaaaaaaaagcctcctttcggaggctttttttattccatctgcgccccgccgttcaggcggaaaacaatattgacgatcaatccgctgcccggcttgcctggctcatagcgccatctgcgcatggcagatttcacttcgcgctcaaacatattagaaggttgcgcagacaagatttccacgttatccacgcggccatccgcagtgacgtcaaatttcacccgtacgcgcccttcaatacgcaaggcctgagctcgcgccggatactgaggctgattgcggcttacggcgcgcgggcccgctggcgcggttacggttggctttgacgtcgttgccgtattgttcatcaccggacgtgaaggcgctgcattttcgaccggctgggtcgcgcgcggttcaaccggacgttcctcgcgtttcggacgctcctcgaccttcttcaccggctttggcttcggcttaggttttggcttcggttcaggtttgtggatcaccaccggggcttccttcggtggctccggaacgggctcaggttctggctccggttcagccacgggctgtggcggcggaggggcaacctgcggcggttcaagatccgctggcgagaccatcgtcaccgaaatcggctgcgcgggcgcgggcatttcaataacctgatgaaccgaggtatacagcagacccgccacaacggcaccgtgaatcacgacagaaagcagcgtcggccagggaaagcggcgaggtaaatcaagggtcatcgaagtcatagtcatcaacgttaaaaaaccgaaccctgattttaaatgcaaatagcaatcatattcaataagacactttgctctggcgcaactttagcgcctgagaggccaaaaaaggcgcatacagatcagggtattaacattgtttttattttacattgcagtcgtttgccctttcacataacgtaactgacacttttaccggttaaggagcttcgccgtgttttacgtgatttactctgaagatgttgctgattcgctcgaaaaacgccagtctgtgcgccctgcgcatctggcacgtttgcagttgcttcaggatgaaggccgattactgaccgctggccccatgcctgcagtagacagcaacgatccgggtgctgccggtttctccggctccacggtcattgctgagtttgaatcccaggaagccgctcaggcctgggctgacgcagacccgtacgttgcagcgggcgtgtatgcaaaagtgacggtgagaccgtataaaaaagtgttctgataccaaagcggctccgaaaggagccttttttagggtggcgattacgcgcctctgtgccgggtaaactgctgctctgtaataaggcttccccactgttcgccttcccactcttttaccagcgtaaacccatacgactcgtacagacgcctggcggcggtcagcttattgaacgtccagaggtgcacagctgaaaaaccggcgctgtcgcaaaaccgcatcgcttcattcagcagttttttccctacgccgtgcccccggcagccatcatcaagaataaaccagcgaagatgggcttcacccggcgccagatcctcgccatcgatcgctaccgagccgacaattttgtcgttgagcactgccagccaaatctggttacagggcttctccagtctttcactaaactcagccagccccgaagccactttggcctcgaagaagcgaccaaaattatgctcccgcgaataataactgccatgcatctccgcgatacggccaatcatgcccgggatatacccctgtactatcttcagctcatcgggctgcatatcgttgcccgcctcgcggcatgccagcagcgcgttggcataaagggagagcccctcagaaatggtctgctgctgggcaggagcaagacgttttattgctgtgaccacgcgctcattgctgaaggtattaattttgctgaccgtctcgtgacctttcgcggtcagcctgaggctctttgctctcgcatcctcggtagaaatgacctcctcgagttcgcctgcggcaatcaggcgagccagcatccgactgacgctggacttttccaggcccagcagctgtaccagctgactcgccgtcatctcttttcgtagggcaatttcgaccagagtatggacggccgaaggcgagtaattcgttgaggccagggtagaacccataaaacctaactctcgcaccatcaggcgcgaggaacgtcgaataacactgactaccggggtttcgctgtgcatgttatgtcctcaccatttagttgtactatacaaccaaatggtgagggagtgtcaaacacaatgaaaaaaggctcccgcaggagcctttcatcaatcaatcaatgcagcgacgctaacctcgccgcaaacccgacaaacagcagccctatcagcccgttccccagctttgccagtttctttttcgttttgagataacgcgtgacaaacgcaccggagaagatcaggaagctcatgtacatgaagctgatcaactcaagcgtcgtcgcgaggataaggaaagaggtaccggtgttctgtgcattcacgtcgatgaactgaacaaagaacgagacgtagaacagaatcgcttttggattcgtcaggctcagcaccagcgaacgtttcatgatcgtgctggcaggctcggtgccgctttcctgagcgtgattctggcgggtaatgaccgaccagagcattttgccgcccagccacagcaggtagaaggcgccgagataacgcacgatattaaacagtactggcgtggtctggattaatgcagcgacgcccgcccaggcaagaaacatcagcaccgcatcgccgataaatacacccgtggcggccaggtacccttttttaacgccgtgtccaattccagttttaagcacaaaaagggtatttggccccggtaccagcacgataaaaaacgcgccaacaacatacgtccagaaattcagtacgccaaactccgcaaacacttcttctccctccttttgctcaacacaacaggaatagcgctgcaaccacgctactcccaaaaatcagaccttataaaatcagcgggcaccattacggtgccctcatggtactcagatatcctggacggcgaacagcaacgcgttgcggtgccgggtcattccacattttctgatggcgtgaatacgcatattgcggcgggattgtgcttccagccaacgagccttgcgacgactcacctgtcgcaacatgcgccagcgccctacttctgttctactgcgcttcatgtctacaactctttctcaaacagagacgccattataaacccaacccggctgcaaaccagcgcttttacctggcgtttttatttgccagatgaatcctgatgcgtacactcataacaatacgctttcaaaaggatttttttacctatgacaaccttctacaccgtggtgagttggctggtcattttgggatactggctgttaatcgcgggtgtgacgttacgcatcctgatgaagcgcagagccgtaccctctgccatggcctggcttctgatcatctacatcctgccgctggtgggaattatcgcctatctctctttcggtgagcttcatctcggtaaacgccgcgccgagcgggcccgcgccatgtggccctccaccgcgaagtggctgaacgaccttaaagcctgcaagcatatctttgccgaggagaacagcagcgtcgcctcgtcactgtttaagctgtgcgagcgccgtcaggggattggcggcgttaagggtaatcagctccagctgctgacctcgtccgacgacgttatgcaggcgttaatccgcgatatccagctggcgcgtcataatatcgagatggttttctatatctggcagcccggcgggatggctgaccaggtcgcggaatccctgatggccgcggcgcgacgcggcattcactgccgtctgatgcttgattctgcgggcagcgtggcatttttccgcagtccctgggcagggatgatgcacaatgccggtatcgaggtggttgaggcgctgaaggttaacctcctgcgcgtgtttctgcgccggatggaccttcgtcagcaccgtaaaatgatcatgatcgataactatattgcctacaccggcagcatgaacatggttgacccgcgcttttttaaacaggactcgggcgtgggtcagtgggtggatttgatggcgcgtatggaggggccgattgccacctctatgggcatcgtctactcctgcgactgggagatagagaccggcaaacgcatcctgccgccaccgccggacggcaatattatgccgtttgaagaggccagcggtcacactattcataccattgcttccgggccgggcttcccggaggatttgattcatcaggcgctgctgacggcgacctactcggcgcgtgaatatctgatcatgacgacgccctactttgttcccagtgatgacctcctgcacgcgatctgtaccgcggcgcagcgcggcgtcgatgtgagcattattttgccgcgcaaaaatgactcccttctggtgggctgggccagccgggcattctttagcgaactgctggctgcaggggtgaagatctaccagttcgaaggtggattgctccacaccaaaagcgtgcttgtcgacggcgagttaagcctggtgggaacggtgaacctggatatgcgcagcctgtggctcaactttgaaatcacgctggttattgatgatgccggctttggcggcgatctcgcggcggtgcaggatgattatatctcccgctcgcggctgctggatgccagactgtgggtaaaacgtccgctgtggcagagaattgccgaacgactgttttacttctttagtccgttgctgtaaaacgtgcccaacgatgttaaacaggtagtcatcatggaaatggatctgaacaatcgcctgaccgaagacgaaacgctcgagcaggcctatgacatttttctcgaactggcggttgataacctcgatcccgcagacgtgatcctctttaatctgcagtttgaagagcgcggcggtgccgaactgttcgacccttcagaagactgggctgagcatgtggatttcgatctgaaccctgacttcttcgccgaagtggttatcgggctggccgatgaagacggtggcgaaattaatgatatcttcgctcgcgtcctgctctgccgtgagaaagaccacaagctgtgccatattctctggcgcgaataataaaaaaggctgcgattgcagccttttttatttactccggcaacggattcccacagcggtgacaataacgcgcgttgagttcatgttccccctgatgacatcgcggacatttgcgctgctgcttgcggctctgaaatgcgctactcatgtgcgtggtaatcagcccggtcggaatggcaatgaccgaatagccaatcaaaatcagcactgaggccacaattcgccccagcggcgtatggggcgtgatatccccgtaccccacggtcgttacggtcacgatcgcccagtagacggacgcattgagcgtcgtaaagccatatttcggcccctcaatcagatacatcagtgcgccaaaaacaatcatgacaatggcaataaacgaatagaacagaataagctgatgacgggcgctgacgattgcactccagaatatgcgcagtgagggcataaagcgcagtaatttcagaatacgtaatacgcgaataacgcgcatcgctcgccaggcaaagacatagctcaggctgatttccggccacagccacatgacgtagagcggcagaatggtggctaaatcgataaatccccagaagctgaaaacatatcgggccgggttaggccaggcaatcactcggaggagatattcagcggtaaacaccagggtaatcgccagctcaagccagacaaagacatgccattcgtcaaacgtcaggtggtattgcgtcccggcacccgattcaataaagatgataaccacgctgaggagcgcaaataaaccacaaagaccctcgaagcgccgtccggataccgtttcaggatcgaataaaacatgataaagccgccgacgggctgacgtgaataaacgcgacacagtgacctcgcaaaaaataagggctgacatcatgtcagcccttgcgattataacgggtctactttcaggcaggaaaccgcatgtcggaaactgccttccagaaccggccgcgttttcgcacattccggcccggccatagggcagcgcgtgcggaagacgcagcccgacggcgggttaatcggtgaaggcaattccccttccagaagctggatggtcttattcttttccagatcgggatcggggatcggcactgccgacatcagcgctttggtgtaagggtgcagcggattgtggtacacctcgtcataggtacccagctccacggcgtgccccagatacattaccagcacgcggtcagagatgtgtttcaccacggcaaggtcatgcgcgatgaagatcagcgacagccccatttcgcgctgcagcttctgcagcaggttaaccacctgcgcctgaatggagacgtcgagcgcggaaactggctcatcacagataatcagcttcggttcaaggatcagggcgcgcgcaataccaatacgctgacactgaccgccggagaactcgtgaggatagcggttgatcaggttaggcaacagcccaactttaagcatcatcgccttaacgcgatcgcgcacttcctggcgggacatcttcggatgataggtccgcagcggttcggcaataatctcaccgatggtcatacgcgggtttaatgacgccagcggatcctggaaaatcatctggatatcgctgcgcacgtcgcgccactcgtcgggcttcatgcccagcagatctttacccagccaggccactttgccgtcggtggcttttaccagaccgataatggcgcgcgcaaaggtcgatttaccgcagccggactcgcccaccacgcccagggtttccccttcatacaggcgcagcgtgacgccgtccaccgctttcagggtcttcgacggctgccagaaccactgtttgccgtccttgatgtcgaaatgcactttaaggtcagcaatttcgagcaggacattgcgtttttcatctaatgcgttcataccagctcctcctgcggcttaaagcaggcgcgcagacggcctggtgcaaactcttcaagcggcggtgcgctgttgcagatttccatcgcgtgcgggcagcgcggctggaacggacagcctttcggcaggcgcagcaggtttggcgggttgcccggaatggtcagcagggattccccttccgcatcgagacgcggcaccgcgttcagcaggccaatcgagtaaggatgggctggctgatagaacacgtcacgcgctttgccgtattccatggtacgaccggcatacatcaccagcactttgtcacagatgcccgccaccacgcccaggtcgtgggtgatcatgataatcgccgtgttgaactcacgcttgagctcgttcagcagggtcatgatttgcgcctgaacggtaacgtccagcgcggtggtcggttcgtcggcaatcagcagctttggccggcacagcagcgccatcgcaatcatcacgcgctgacgcataccgccggagaactcgtgcgggaacatgcgcatacgcttgcgcgcttccggcattttcaccgcatcaagcattttgaccgactcttcaaaggcttcggctttgcccagacctttgtgcagcatcagcacttccatcagctgctcaccgacgcgcatgtacgggttcagcgaggtcatcggatcctggaaaatcatcgagatctgctcggcgcgcagcttgttcagctcttgctccggcaggttgaggatttcacgaccgttgaatttcgcggaaccgccaatcacaccgttagcggccagcaggcccattaacgcaaaggcggtctgggatttaccggaaccagattcccccacgataccgagcgtttcacccgcgcgcaggttgaagttaagatcgttcacggcggtcacatccccgtccggggtcttaaaggtgacgcgaagatcttttacgtccagcagaaggtcgctccgctgctgcgcctgtggcgcggttgccgtttcaatcattgtcatgacggcgctccttaacggtctttcgggtcgagggcatcacgcaggccatcgccgataaagttaaaacaaaacagggtaacgaccaggaaacccgccgggtataacagcagccacggtgacacttccattgagtttgcaccgtcactcagcagcgcgccccagctgctcagcggctcttgcgtacccagaccgaggaagctcaggaaggattcaaacaggatcatgcttggtaccagcagtgaggcatagaccaccaccacgcccagcacgttaggaacgatatggcgaaccacgatattcccggtagagacaccgccgacctgcgcggcttcgataaactctttgcgtttgaggctcagcgtctggccgcgaacaatacgcgccatatccagccatgacaccatcccgatggccacgaagatcaacaggatattctgaccaaagaaggtcaccagcaggatgacgaagaacataaacgggaaggagttcaggatttccagcagacgcatcatcaccgagtccactttgccgccaaggtagccggacagtgagccatagagcgtcccgacgatcaccgccaccagcgcggcagcaatcccgaccatcagcgagatacgcccaccgatagcgacacgcaccagcaggtcacgtccggatgagtccgtgccaaaatagtggccagactccatatccggcgcgctggacatcatgccccagtcggtgtcgaaataggtaaattgcgacagcatcggggcaagggtcacaaacagcgcgatgatcaccagaaccaccagactcgccaccgccgcgcggttgtgcataaagcgacgacgcgcgtcctgccagaggctacgaccttccacttccagtttttcactgaagttttccagcgcctcgctgtttttcttactcaacatcatggcgtgctccagttagtaacggattttcgggtcgatgacggcatacagcacatcgacgatagcgttaaagagaatggtcagcgcaccgacgagaatggtcaggctcagtaccagcgaatagtcgcggttaagcgcgccgttcacaaacagctggccaatgcccggcaggccgtaaatggtttcgataaccatcgagccggtgatgatcccgacgaatgctggtcccatgtaggagagcacgggcaacagcgccggtttgagcgcatggcggaagataatccgacgcatcggcagccctttcgcgcgcgcggtacgaatgaagttcgagtgcagcacttcgatcattgaaccacgggtgatacgcgcgatactggcgatgtacgccagggataatgccaccattggcaaaatcatgaactttaatgccccgccgttccagccgccgccaggcagccacttcagcgtaatggcaaatatcatcaccagtaatggcgcgacaacgaagctgggtatgactaccccggtcattgccacccccattacggcataatcccatttggtattttgtctgagcgcggcgatgacgcctgcggtgaccccgaaaacaatggccagaatgaatgccgctgcacccaatttcgccgaaaccgggaagctggacgccaccaggtcgttaacggaatagtctttatatttaaatgacggtccaaaatcaccgtgggccagctgcttcaggtaattgaagtactgggtagagataggatcgtttaagtggtatttcgcttcgatattcgccatcacttctggcggcagcgtacgctcaccggtaaatggacttcccggcgcaaggcgcatcatgaagaaggaaatcgtgatgagaataaatagcgttggaatcgcttcaagacagcgacgtaggataaatttcaacattgcccgtaccttctggcgtgtgcctatataatgtgacgttggttagacaccgtggggcgagcacgcccgccccactcattgccattaatgcttgataatatacaagtttttaacgtagatattatccatcgggtctttaccggtgtacccacctacccacggtttcaccagacgggcgttaacgtagtagtaaaccggaacgatcgcggaatctttatccagctgctgctcagctttagagtacagttcagtacgctgtgcttcgtcagtggttttcagcgtgtcggcaatcagcttgtcaaacgccgggctcttatagtgcgcggtgttgtttgagctgtcgctcagcatggtgttcaggaaggaggtcggttcgttatagtccgcacaccagccggcacgcgccacgtcaaaggtaccctgatgacggctgtcgaggaaggtcttccactcctggttctccagcttcacgttcgcgcccaggttctttttccagatcgaggcgacggcgatagccagttttttgtgcagatcggaggtgttgtacaacaggctgaaggtcagcggcttatcggcggtatagcccgcttcggccagcagtttcttcgcttctgcgttacgctgttcctgcgtctgtttgaaccagtctggctcggtcagttttgcgccatcggtgtatggaggggtatagctgtatgccggcagatcgccctggtttttcactttgttcacgatgatatcgcgatccagtgccagcttcagcgcagtacgaacacgtacgtcggtgaacggtgctttctggttgttgatttcatagtagtaggtgcacaggtacgggtcgacgtgaacttctttcgggatctctttcttcagcttctggaacagttcaatcggcatgttgttataggtcatgtcgatttcgccgctgcggtagcggttgacgtcagtcacttcggaagaaattggcaggtaggtcacctgattaatcacggttttcgcgttgtcccagtattgcgggttacgctcaagcaccatacgctcgttgaccacccagtctttcagcttataggcgccgttggtcacgatattggcaggctgggtccatttttcaccaaatttttccacggcggattttggtaccggggagacggacgggtgaaccagcagcttatagaagtacggaacaggttcgctcaacgtgacttcgaaggtattggcatcgatcgctttaacgcccagatcggtgatcggttttttgcccgcgatgatgtcatcaatattggcaatatggccatattgcaggtagctcgcatacggagaggcggtcgttggattcgccagacgctgccagctataaacgaaatcttcagccgtcaccggcgtgccgtcggaccatttcgcatctttacgcagatggaaggtccagactttgaaatctttgttttcccatttttctgccacgcccggtgccgggtggccgtctacgtcagtgaccagcaggccttcgaacaggtcgcggttaacgttagactcaggaacaccttcaattttgtgcgggtcaagagactgaacttccgcaccgttgttacgcaccagcgtctgcttctccgccagctgaacacctgcaggaacgtccgcagccattgcagcgtttcccgcgattagcgcagttaaaatccccgccgctaccagatttttttttgtgatgatggacattgtgttgatactccactcattataatgaccggccttcgccagctgtgtaatcccctgttgaggcctgtacagcgcaggagttttttttgctgctgtcaggttcttcttttactgcttgctatcaccgacttttttattactgaccgctcgtatggcagtcttgcgtcgattctttacaggcctcccctgtttgagacctgttctggatatccgagatgagaaccatatgaaaataattctcatctgattgttttatgctgcaaaatattaggccggaaagtatcaaatggcgtaatcgtgcgccaatacattttgcaaatttgttaagcaattctcttttacggtgagtaccgtatcgttgagggcagccctgccggacatcgaacatcactataaagacatgatattcaataggatagagaaaattttctctacaagcgcgtcgctgcgctatcatcgtgtgattttgtacaaaaatttaacaactggttattatttagcacattcatctaggggaatgttgaaattactaatatcatttcggttatctctcagcaagccccagagtatcatgtgagtaaaataacagagcgatcgaagattttctgcgcaggcggggtaaggcggaattaataacctattgaaatacaagaaatgaacattattagtagaatttattatgatatgtgagcatttcaactttagttatatgatttgctgataatcacgtaaaaaaacggagccgtcgctccgttctttcatatgaagtattaatgcaataatccggggaaaatgcttttaatacccgttacgatgaattcgatccctaacgccatcagcaacaggcccatgatacgcgtaatgacgttgatgcccgtctgacccagcaagcgcaccagccagggtgccatgcggaacacgccccaacagcagagcgcaaaaatggcaatagccacggaaaagccaatcaggtgcatcaggctatgataacgcgtgccccagacaatggttgaactgatggccccaggaccggccatcagcggtaaggccagcggcaccacgccaatgctttcgcggatggcggtttctgacttctcttgtttattctgcttatcctcgcccagcttaccgctgatcatggacatggcgatggtcaccaccaggatcccacctgcaatgcggaaagaatctatcgaaatcccgaaaagctggagaatcgtgtcgccgagaaaaagagaggtgagcaatatgatcgccaccgacaggttagcggtgaggttggtcttattcctggccgccgctgtctggtaactcgtcatactaatgaagacaggaatgatccccaccgggttgaccagggcaaacaaaccaataaaaaatttaaaatacgttggaaaatcaaagagcgtttggatcacgttttgctccgcttatacatatgccctggactgacaatttgtcatgagaaatcgcgctgaagataccctttttatcagcatacttcacttgaaatctgtaccaaaacgttatcatttcaggatgttaaacatttgtataatcaatgatagtgccgcttccaatacttacgtaattatttaacactggaaaaatcagcacgaaataaacctgctgaaaggtatcagcttaggggaaaattgacgcagatcatgattttcgtactcagaagtgagtaatcttggttacacccccagggaggccacctgccaaaaagggatgatgctaaggtaaggctcttttagtaaattaatgtgctggtgtagaaagtaactctttgttttattttgtgttacgcaagtgctatcggctctgtctatactgtgtgacgtatcgagcgctggtttactaaaagagtttaaacattatcaggagagcattatggctgttactaatatcgctgaactgaacgccctcgtcgagcgcgtgaaaaaagcccagcgtgaatatgccaatttcacccaagaacaggttgataaaatcttccgcgcggccgcactggctgctgcagatgctcgaatccctctcgctaaaatggccgttgccgaatccggcatgggtatcgttgaagataaagtgatcaaaaaccactttgcttcagagtatatctacaacgcctataaagatgagaaaacctgtggcgtgctgtctgaagacgacaccttcggtactatcaccatcgctgaacctatcggcattatctgcggtatcgttccgaccactaacccaacgtctaccgctatcttcaaatcactgattagcctgaagacccgtaacgcaatcatcttctctccacacccacgtgcgaaagacgcgaccaacaaagctgcagatatcgtcctgcaggccgctattgctgcgggtgcaccaaaagacctgattggctggatcgaccaaccttctgttgagctctccaacgcgctgatgcatcacccggacattaacctgattctggcgaccggtggtccaggcatggttaaagctgcatacagctccggtaaaccggctatcggtgtgggcgcgggtaacacccctgttgttatcgacgaaactgctgacatcaaacgtgctgtcgcgtctgtactgatgtctaaaaccttcgataacggtgtaatctgtgcatctgaacagtctgttgtagttgtggattccgtatatgacgcggttcgcgaacgtttcgccagccacggcggctacctgctgcagggcaaagagctgaaagcggttcaggacatcatcctgaaaaatggtgcgctgaacgccgctatcgtgggtcagccagcctacaaaattgctgaactcgcaggctttaccgttccggcaacaaccaaaatcctgatcggtgaagtgaaagttgttgacgaaagcgagccgttcgcacacgaaaaactgtctcctacgcttgcaatgtaccgtgcaaaagatttcgaagaggcggtagagaaagcggagaagctggttgccatgggcggtatcggtcacacctcttgtctgtacactgaccaggataaccagccagagcgtgttgctcacttcggtcagatgatgaaaaccgcacgtatcctgatcaacacccctgcttctcagggtggtatcggtgacctgtacaactttaaactcgcaccttccctgactctgggttgtggttcctggggtggtaactccatctctgaaaacgttggtccaaaacacctgatcaacaagaaaaccgttgctaagcgagctgaaaacatgttgtggcacaaacttccgaaatctatctacttccgccgtggctctctgccaatcgcgctggatgaagtgattactgatggccacaaacgtgcgctcatcgtgactgaccgtttcctgttcaacaacggctacgctgaccagatcacctctgtgctgaaatcggctggcgtcgaaactgaagtgttcttcgaagttgaagctgacccaaccctgagcgtggtacgtaaaggtgctgaactggctaactccttcaaaccagatgtgattatcgcactgggtggtggttccccaatggacgccgcgaaaatcatgtgggtgatgtacgagcatccagaaactcacttcgaagaactggcgctgcgctttatggatatccgtaaacgtatctacaagttcccgaaaatgggcgtaaaagcgaaaatgatcgcggtcaccaccacttccggtaccggttcagaagtcacgccattcgcggtagtaacagacgatgcaaccggtcagaaatacccactggctgactatgcgctgacgccagacatggctatcgttgatgcgaacctggtcatggagatgccgaagtctctgtgtgcgttcggtggtctggatgcggtaactcacgccctggaagcctacgtttctgtactggcatctgagttctctgacggtcaggctctgcaggctctgaaactgctgaaagaaaacctgccagcgtcctacaacgaagggtctaaaaaccctgtagcacgtgaacgtgtccacagtgccgcaaccatcgccggtatcgcgtttgccaacgccttcctgggtgtttgccactcaatggcgcacaaactgggctcacagttccacattcctcacggtctggcgaacgccctgttgatcagcaacgttatccgttataacgctaacgacaacccaaccaagcagactgctttcagccagtacgaccgcccacaagcacgtcgtcgctatgctgaaatcgctgaccaccttggtctgagcgcaccgggcgaccgtactgctgccaagattgagaaactgctggcatggctggaaagcctgaaagctgaactgggtattcctaagtcaatccgtgaagcgggcgtacaggaagctgacttccttgctcacgtagataagctgtctgaagatgcattcgatgaccagtgtactggtgctaacccgcgctacccactgatctccgagctgaaacagattctgctggatacctactacggtcgtgagttcaaagaaggtgacgttgccgctgtgaaaacagaagcacctgtcattaaagctgacaagaaagcgaagaaaagcgcttaattgacatcagcaaatgaaaaacccgcctttatggcgggtttttttatgtctgaataataagccagacgttattttctgttgtcgtgctgaatcgccgtcagcgagcctacagacagcgcttctttataatgcttacggcagaccgaaacatagcgttcattgccgcctatcaccacctgctcgccatctgcataaggtttcccggcctggtcaagacgaagtaccatactggctttacgaccgcagaagcagatcgttttcagttcgacaagtttatccgaccaggcgagcaaatactggctcccttcaaaaagctcgccgcggaaatccgtgcgcaggccataacacagcacggggatatcaagctcatcgactacctctgacagggcatggacctgttcacgcgtcagaaactggctttcatcgaccaggacacaatgaatgggctgcgcagcatgttctgcacgaatgtcttcaaacagatcggttttcgggttaaacagccttgcaggcgacgagagccctattctggagctcaccttccccgcgccaaagcgatcgtcaatttccgccgtataaacaacggtacgcatccctcgctcctggtaattgtacgaggattgcagcagcgcggtggatttcccggcattcattgccgaatagtagaaataaagttgtgccattggccgtaaaaccctaatcaatgtgtaatattcccgatgagtcattgtaccatattttgtctggtcatcagcgatgcagcgcacagaggatgcagttcagtacggcgttcagtaccgtctgtttaacaaaataacccgttaaaacatgaagtaaacgcattcagccaggcgacgagattataagttcaaccaagcataacacttctttttatagtggaatccgtgttctttaagattcactatttattaactatttcaggcttaacaccaggggtgagaactaatacaaaaggctgatatttctccgccgcaactataattcctgcgggaaatgtcacaaaaaaaagatgcaggcggcctgttttagcatgctcagatgataacaaccgagactgctggttggcggaatttaagttagcgtaattaataatagcggcaatatttagtattttttgaattccttacattcctggctattgcacaactgaatttatggctctattattaggtcaacaaaccaccccccattataagtttgagattactacaatgagcgaagcacttaaaattctgaacaacatccgtactcttcgtgcgcaggcaagagaatgcaccctcgaaacgcttgaagaaatgctggaaaaattagaagttgtagttaatgaacgtcgcgaagaagaaagcgctgctgcggctgaaatcgaagaacgtactcgtaaactgcagcaatatcgtgaaatgctgattgctgatggtatcgatccaaatgaattgctgaacagcatggctgccgctaaaaccggtactaaagcaaagcgtgctgcccgtcctgctaaatatagctacgttgatgagaacggcgaaactaaaacctggactggccagggtcgtactcctgctgttatcaagaaagcgatggatgagcaaggtaaacagctggacgacttcctgatcaaggattaatcgagccttattcagaaaaatcccgcttattgcgggattttttttaacctaaatttgtcgcaaacatcctcttacactctgtcataaagcattatttagcaatttcatcgactgtactttaagacaggttttcgggagtgttacgggcataaaaaaaccggtgggcaacgcctcaccggtttgaacatttgcagcggtggcttatttcttaatacctacgctctctttgagccaggttttaaattcttcgccgagggtattgtggcggataccatattcaacaaacgcctgcatataaccgagcttattaccgcagtcatggctcttacctttcatatggtaggcctcaacggtctctttctcgatcagcatatcgatggcatccgtcagctggatctcatcacccgctcctggaggcgttttagccagcagaggccagatctcagcactcaggacatagcgacctacaacagcaaggtttgaaggcgctacgtcggctttaggcttctctacgacgccaaccattggcacactctcacccggctcaaggttaacgcctttgcagtcaaccacaccgtatgccgttacgtcttcaacaggctcaaccataatctggctgctgccggtttcgtcgaaacgcttgatcatttcagccaggttatcctgagaaagatcggattcgtattcgtccagaataacgtcaggcagaattaccgctacaggctcatcacccacgactgggtgtgcgcacataacagcgtggcccagacctttcgccagcccctgacgaacctgcataatggtgacgtgtggagggcaaatagactgaacttcttctaacagctgacgcttaacgcgcttttccagcatggcttcaagttcaaagcttgtatcgaaatggttttcgatagagtttttagatgaatgcgtaaccagcacaatttcagtgatgccggctgcgatacattcattcacgacatactggattaatggcttatcaaccagaggcagcatctctttaggaatcgccttggttgctggtaacatcctggtccccaatcccgctaccgggataacggcctttctgactttcgaatttagggcagccattcaaattctcctgagctgttcaagttttgaacttttatgcaataaataacgcgttgagtatatcagcctcgccccgcagtccgggtctgaaaagaacgcgttgccgatcaattaggataaatacgcatgaaaccgggcagcgatagtagcactccccgcaaaacacaggtaaagcaatcttaaaatgacgatccaattgcttattccgtggacaacattaagcgtagccgccccccggcgccccaaatttggcactgccacgaggaacagcggtggctaatttgattaagatacgccgttcccaacgtcccaagcggtacaccgttactcacctgaatatggtgttcaccggtattcagtgatgcattgagaccggctgaaacgaggatcagattttttaaaccgctgtggtaatagccgaccaatagcggaaactgtccaggcaaattggcctgacgaaaaagctggtttacctgtttgagtaaactgcctaactccggcaaccgttgtccctgatgggataactgttcctgcaacaaaccattaaatagcgcacgaagaagcaacgccgctaatacaccgttatcccccgcccgggtgacatccagagaataaaaggcaaggtcggaatctgacagtggcgcaatatccagcaccagccctggctggtcagcggccaccagctgccgataatttacgcgacagtgggaaatagtttgctgaacgggcggctggagctcttgcaacagtttcgccgcagcaggcggattactcaccagagcgtcccagtcctggaaaagacgctcctcttcctctacccgggaattaaacatattcggataaaggcacgctaagaccgtttctcgcagccggttcaaatctttaaccggtttaagcagaatatcctgtaccccaagacgtaatgcttttgcgatatccgccatgttttcggtggcagagatcaccagaatcggcgtctgattgccttcgttacgcagatgctcaaccagcttcagtccattcatgcgcggcatcgcaatgtcgcaaatcatcaaatcgggcgtaatgctgatcattttttccagggcgtcgatgccatcttcagccagtgacgtcattgcgcccagcgaggataaccacgaatccagtagcgatcggaaaacgggctcgtcttcaacaatcaaaatgtgttttccggccaatggctgcgtcatggttcctcccctggctgacagtaactaaatagtggcatgcgatcggcactatcgcctgtcagattttgctgaagtagtcataaaaaggtgcttaacgtgcggcttgcacaaaaggcaacaattcgtccattttcttttcgacggctaacgagcccgctgcgatggcggcctcagcccgatggaaatcaagagtagagatttgcggacagtacggctgaataagaatatccggaggatcgcctgccatacggttacgtttaaggcgattctcgagtacctgaattgacgtggtcatgatttctatcgccgtcggcgctgcaaccgaacgacgtgcggtcatacgcccgattcttccgcgcaggcgctcgtgccaggccagtttctcgccctcagcatcttcgctctggaggttgaccggcatgagatcctgttgcatcaggtgggcgtcgtgctgcaggtcgacggcaatcacgatgtcagcgcccattgcacgcgtcagagagatgggaaccgggttaacgacgccaccatcgacaagccagtaaccgttgtgtgggacaggcgccatgagtcccggcatactgcaggaggcacgcacggcaagatggatatccccttcggttagccagagttcgcgacctgtactgaggttcgtcgcgacggcgccgaaaggcatctgacaatcagtgaagtcttcgaggggcataacctggcggaactggttaaagacgcgttcgcctcgcagcagtccaccacgctgccaggagaggtccatcagacgcagcacgtcccagtagctgaaggagcgcacccacgtctcgagctccggaagcttcccgcacgcgtaagcggagccgacaagcgatccgattgagcaccctgcaacaatatcgacggtaatgcccatctcatttaaggcattaatcacgccgatgtgtgaccatccccgggcggcacctgaacccagcgccagcccaattttaacctttctcattagtcctgtttaacgtcccctggattcctgacatggcatcaacgcaacgcctcagttaacatagtgctacccgaagcgttttacgcctttattttttgttccaggaagagaatcgtgtctcaactctgcccttgtggtagcgctctggagtatagcctatgttgccagcgatatctttctggcgatcaggttgcaccagacccgtcacaccttatgcgttcacggtacactgcttttgtgatcaaagacgcagactacctgattaaaacctggcatccatcctgccacgcagccgatttcaaacaggacatcgaagccgggtttgcgaacacgcagtggctcggcctcaccgtctatgaatcctctccaggcagtcatgaagatgaaggttacgtcagctttgttgcccgttttaccgagaacgctaagcctggcgccattatcgagcgttcccggttcttaaaggaacgcgggcaatggtattatattgacggaacgcgtccacagtttggtcgtaacgatccctgcccgtgtggttcaggtaaaaaatttaaaaagtgttgcgggcagtaatgcctgacaacccagacttcgcaaatacaaacaggatttcccggcgatgcaatcattacaacgtaaagttctgcgcaccatctgtcccgatcaaaaagggctgatcgcacgaattaccaacatttgctacaagcatgaactgaatatcgtgcagaacaacgagttcgttgaccaccgtaccggccgcttcttcatgcgtaccgaactggaaggtattttcaacgacaccaccctgctggccgatctggacagcgcgcttccggaaggctccgtgcgcgagctgacccctgcgggccgacgccgcatcgtgatcctggtgaccaaagaagcacattgtcttggcgacctgctgatgaaagccaactacggcggtctggatgtcgaaattgcggctgttattggtaaccacgagacgttgcgctcgctggtcgagcgctttgatattccgttcgagctggttagccatgaaggccatacgcgcgaagagcacgacgatctgatggcgcaggccattgaagcgcataacccggactacgtggtgctggcgaaatacatgcgcgtgttaacgccatctttcgtggcgcgtttcccgaacaagatcatcaacatccaccactcgttcctgccggcctttattggcgcgcgtccataccaccaggcctacgagcgcggcgtgaagatcatcggcgcgacagcccactacgtgaatgacaacctggacgaaggtcccatcatcatgcaggacgtgattcatgtggatcacacctacaccgctgaggacatgatgcgcgcaggtcgtgacgttgagaagaatgtgttaagccgcgcgctgtatcaggtactggcccagcgtgtcttcgtttacggcaacagaaccatcattctttaatctttcggaaaatgaattgattagctttgcgcctttacggataaaaagcaggcaaacaacttcatttccctaaaggaaagctttacaggggcgtctcatttgatatgatgcgccccgcttccagcaggaagcaggccagtaaaaagcattaccccgtggtggggttcccgagcggccaaagggagcagactgtaaatctgccgtcatcgacttcgaaggttcgaatccttcccccaccaccatctctcagcacgacctcaaaatttgaattacccctggtggggttcccgagcggccaaagggagcagactgtaaatctgccgtcatcgacttcgaaggttcgaatccttcccccaccaccatcactttcaaataactccaaatcttctattcgcaccgggcatcatgcatttccgtaacggggaaggaagagaagcttcgactaaggttcgattcgagcgcagcgagaaagcgttgccgaaggcaacgacccgaagggcgtggcgcaacgcgccgggtcatccttcccccaccaccatcacttccccaacataaaaaaaccgagtccgcccttgtaggccgggtaaggcgcagccgccacccggcgacagaaacctacatcggaggcaaacgacgcctgaccggcgaactcttcacaatcgacgtattacactgggcatgttccgccaggccgtccagcagcgcatcaagctgttcgattgaccgcaccaccagcctgatgacgaagcagtcctccccggtgactttgtcgctctcaatacactccggcatcgcctgaatatacttatccaccttatgcaacagccctggcaacggccgtacgcgcaccagcgcctgcagcgtataccccagcgccgccagattcacccgtgcaccataaccctgaatcacaccgcgctcttccagccgcttcaggcgctctgccgtactgggggacgtcagaccgatgcggccgctgagcaccttcaacgacatgcgcgcatcctcaaccaggcaggctaaaatttgtcggtcgatatcatcgataaggcattccattcgtttcacctaattttaaaaagtcatttaccttttcaaccttatctcacccctgtaaaacccgacagcgattttcgacaatagcctcattaatctggaggtggatgatgcgtgatttccataaaggcgtgtggcaaatgagcctcgcgatgttaatttccggctctatcggcgcgtttgttttgctctccggtctgccggtgacggaagtggtgttctggcgctgtcttatcggggctatggcgctatttatttttatccgggcaagtcaaaagcccttcagccccctcacccgcaccacgctgctgctggctattcttggcggcgtggcgctcgtggtgaactggctgctgctcttcgcggcctatgagcgcatctcaattggtctttcaaccgtggtctataacacccagccttttatgctggtcttgatggggatgtttctgggcgaacgcgtcagcctggcgaaatggggctggctattcctcgcctttggcggcgtggtgatcctgctctccagcgagctgaccggcgcgcatggcagcgaatggctcaccggaataggtttggccatggccgcggccttcttctacgcgctgacggcaatcattgcgcgcaaactgaaaacaatcgcaccgcagcatattgcctttatccaggtgctgaccggcgtcgtgatgcttttgccgtttgccagcctgccgtcattttccggcgatttcccctggccgatgctgctgacgctcggcattgtccataccggcattatgtaccagctgctctacagcgcaattcagaagctgcctacgcccatcaccggctccctgtcgtttatctatccggtggtggcgattgttgtcgataatctggtgttcggacacgcgcttaacctgacgcagctggcgggcggcgcgctgatcctgtttgctgccgcaggcaacaacctgggctggggcgaaaaaaaaccccgcgagtgcggggttagtatcaaaacggcgaattagcgacgggcgcgtacaatctggtatttgcgcgtcaggtactccaccggcgcgctccagatgtggaccaggcgggagaacgggaacagcacaaacagcgtcatccccagcaccaggtgaacgcggaagataaacgccacgccgtccaggtgctcagatgctccgccgtggaaggtcaccacggactgcgcccagccgaccagcttcatcatttcgcttccgtccatatgctgcgccgagaacggaatggtcagcagacccagcgcgcactgtaccatcagcagggagaggatcaggatatccgctgcggttgtggtggcacgcacgcgcgggctgaacagacgacgcttgagcagcagcaggccgccaacaagggtcatcacgccgcaggcaccgcccgcgatcatcgccatcttctgcttcacctcaatcggcagccacgcttcatacatccagtgcggcgtcagcatcccgaggaagtgaccggcaaaaatgcccagaatcccgatgtggaacaggttagacgcgacgtgcatccccttgcggtccagcatctggctggaggcggcacgccaggtgtactggccataatcgtaacgcagccagcttcccaccaggaacacggtgcccgcgatatacgggtaaatgtcaaagaagaacatattcaggaagtgcattagtgccgtcctccgttagagatattcaaatattgcggggcaaccgcgccggcaaaacggcgctggtgagcagcgatttcagactcgccgcagttctggtcagcaaagaatttgacctgctcttcttcccagaccgcatccagcgcctgtggcgtatcgtcacgggcctcatcggcgattttctccgccactttttcactgtcgacagaggcgttggcgagcttcaccagcagttcgaacagcaccgcgtagcggctctcacgctgctgaagacgcgcgccgagcagcgccaggatcggcgcgatgtcctgcagaccgcccagcgcctcttcttttggcagctgcgccagatattccagatagagcggcaggtgatccggcagctcgcggctgtcgagctgcaggccgtgctgctcgtactgtgccatcaggtcaaccatcgcctgaccgcggtcgcgggattcaccgtgaacgtgttcgaacagcagcagcgaggtcgcacgcccccgatcaaacagctggctgtagtccgcctgcgcatcaagaagatcgcgcgccagcaggtcacggaggaaaacgcccagcttctgggcatcttctttatccagattttcagatgccgcaagcgcatcaaagagctcctgctggtgctgcgccagcgcagcatccgggtactcgagcagacgcgaaacaatgacgagttcaatcatgagtgcggctccgttttactggtcacatccatggcgtcgatgcgacggctgttgaacaggttgaatttgctgtctgacccgtggcaaccgtcgccgaaggtaaagccacagccatttttttccgggaaggcctcgcgggccagctcacggtggctgctcggcaccacgaaacggtcttcgtagttggcaatcgccagatagcggtacatttcctgcgcctgcgcttcggtcagaccgacctcttccagcgcgcgggtgtcggttacgccgtccacggtttcggcacgcttgaagtggcgcatcgccagcatacgcttcagcgccagcagtacgggctgggtatcccctgcggtcagcaggttggccaggtactgaaccggaatacgcaggctctccacgtccggcagaatgccgttgctgcccagctcacccgcgtcagcggcagactgaatcggcgacagcggcggcacgtaccagaccatcggcagcgtgcggtattccggatgcagcggcagggccagcttccagtccatcgccattttgtacaccggagactgctgcgcggcgtcgattacgctctgcggaatgccgtccttcagcgcctgctcaatcaccttcggatcgttcgggtcgaggaagacatccagctgacgctgatacagatccttctcgttctcggtgctcgcggcgttttcaatcgcgtccgcgtcgtacagcagcacgccgaggtagcgaatacggcctacgcagctctcggagcagacggtaggcataccggcttcgatacgcgggtagcagaagatgcacttctcggacttgccgctcttccagttgaagtagatttttttgtacgggcagccggtgatgcacatgcgccagccgcggcacttgtcctggtcgatcagcacgatgccgtcttcttcacgcttgtagatggcgccgctcgggcaggtcgccacgcacgccgggttaaggcagtgctcgcacaggcgcggcagatacatcatgaaggtgttttcgaactggccgtacatcgccttctgcatgttctcaaagttctggtctttggcgcgtttctcgaactcgccgcccagaatctcttcccagttgggaccgctggtaattttgtccatgcgctgcccggtgatcagcgagcggggacgggcgatcggctggtgtttaccttccggcgcgttgtgcagattctggtagtcgtagtcaaacggctcgtagtaatcctcgatgcccggcaggtgcgggttagcaaagatttttcccagaagccaagcgcggttacccatgcgcggctgtagcttgccgttgattttgcggatccagccgcccttccacttctcctggttttcccagtcggtcgggaagccggtgcccggcttgctttccacgttgttgaaccaggcgtattccataccttcgcggctggtccagacgtttttacaggtgaccgagcaggtatggcagccgatgcatttatccagattcagcaccatgccgacttgtgaacgaattttcattttacgctctcctgtacctggtcattaccttcgccgtctaaccagttaatattcttcatcttacgtaccaccacgaactcatcgcggttcgatcctacggtgccgtagtagttaaagccgtaggccagctgggcatagccaccaatcatgtgggtcggcttcggcgtaatgcgggtcacggagttgtggatcccgccgcgctgctcggtgatctctgaccccggcaggttcacgatacgttcctgcgcgtggtacatcatggtcatcccggccggtacgcgctggctcaccaccgcacgcgccgtcagggcaccgttgctgttaaacacttcaatccagtcgttatcttcaatacccagatctttggcatccgtttcgctcatccagacaatcggaccgccgcgcgacagggtcagcatcagcaggttgtcgctgtaggtggagtggatcccccacttctggtgcggcgtcaggaagttcagcgccttctccgggttaccgttggattttgcgcccattaccgctttcacggagcgggtgtcgataggcggacggtacaccagcaggctttcaccgaagtcgcgcatccactggtggtcctgatacagcgactggcggccggacagggtgcgccatgggatcagctcgtgaacgttggtgtagcccgcgttataggacacatgctcgtcttccaggccagaccaggtcgggctggagataatcttgcgcggctgggcctgaatatcgcggaagcggattttctcttcctctttattcgtcgccaggtgcgtatggtcgcgaccggtgaactcgctcagcgccgcccaggccttcaccgcgacgtggccgttggtttccggggccagggtcaggatcatctctgccgcatcaatcgccgtgttcagcatgggctggcctttcgccgggccgtccgctttggtgtagttgagcttgcgcagcaggtccatttcgctctgggtgttccaggcgatccctttcccgccgttaccgatcttctccatcagcgggccgatagaggtaaagcgctcgtaggttgccgggtagtcacgttcaaccggaatgatgtgcggtgcggtcacgcccgggatcagatcgcattcgccttttttccagtccttcacgtccagcggctgcgccagttcggcggcagagtcgtgctggataggcagcgttaccacgtcggtctctttgccgaggtgccccacgcagacttcggagaaggtcttcgcgatgtctttgtagatttcccagtcgctttttgattcccacgccgggtcaacggccgcagacagcggatgaataaacggatgcatatccgaggtattcatgtcgtctttttcgtaccaggtggcggtaggcagcacgatgtcggagtaaaggcaggtgctggacagacggaagtcgagggtcaccaccagatccagcttgccgtcgagaccgttgtctttccactccacctcttccggcttcacgccgccctgcttgccgagatctttcccctggataccgttttcggtaccgagcaggtacttcagcatgtactcgtggcctttaccggacgagcccagcaggttggagcgccagatgaacaggttgcgcgggtggtttttaccgttttccggctgttccgccgcgaagcggattgagccatccttcagggattgcacggtgtaatccaccggtgacatgcccgctttcttcgccgcttccgcaatgcgcagcgggttcgtgcccagctgcggcgccgacggcagccagcccatgcgctcggcgcggacgttgaagtcaatcagatggccgctgtagcgggatttatccgccatcggcgacagcagctcctgtgcggtgaccgtctcgtaacgccactggctggagtggttatagaagtaggaggtgctgttcatgtggcgtgccggacgctgccagtcaagggcaaacgccagcggctgccagccggtctgcggacgcagtttttcctgacccacgtagtgcgcccagccgccgccgctctggccgacgcagccgcagaagatcagcatgttgatcaaaccacggtagttcatatcgaggtgataccagtggttaagacccgcaccgacgatgatcatggagcgaccgtgggtcttgtcggcgttttccgcaaactcgcgggcgatacgcacgatctgcgcgcgtggaacgccggtgatctgctccgcccatgccggggtataagccttcacgtcgtcatagccggttgcgcagttttcatcacccagaccgcgttccaggccgtagttcgccatggtcaggtcatagacggtggtgaccagcgcggtagtcccgtcggccagctgcaggcgtttcaccggcagcttgtgcatcagcacgtttttcagctcaaccttgttgaagtgctcggaaccttcgccgccaaagtacgggaagcccacctcagcaatctcgtcctggctacccagcatgctcagacgcagttccgtctcttcgccggtcgtgccgttacgctgctcaaggttccacttgcccttctcgccccagcggaagccgatagagccgtttggcgccaccagctcaccgttgctgttataggcgacggttttccactctgggttattttcctggcccagcgcgtccaccagatcggcggcgcgcagcgtacggcctgcggcgtagtagccgtcacgctcttcgagcatcaccagcatcggcatgtcagtgtagcgacggacgtagtcggtgaagtactggcttggtttatccaggtggaactcgcgcagcatgacgtggcccatcgccatcgccatcgcggcatcggtcccctgtttcggtgccagccacaggtcgcacagcttggcgatttcggcgtagtccggggtcaccgcaacggttttggtgcctttgtaacgcacctcggtaaagaagtgcgcgtccggcgtacgggtctgcggcacgtttgagccccaggcgatgatgtagctggagttgtaccagtcggcggactccggtacgtcggtctgttcgccccaggtctgtggagacgccggcggcaggtcgcagtaccagtcgtagaagctcaggcaggtaccgccgattaaggagagatagcgcgcgccggaagcgtaagagaccatcgacatcgccgggattggcgagaagcctgccacgcggtcaggaccgtaggttttcacggtgtagacgttggaggcggcaatcagctcgttcacctctttccaggaagagcgaacgaaaccaccgcgaccgcgcgcctgcttgaagcttttcgctttgtcggcgtcctcgatgatggatgcccacgcatcaaccggatcgctgtgctgcactttcgcttcacgccacattttcatcaggcgtttacgcatcagcggatatttgagacggttggcgctgtagagataccaggagtagctggcgccgcgcgggcagccgcgcggttcatggttcggcatatccggacgggtgcgcggatagtcggtctgctgcatttcccaggtcaccagaccgtttttaacgaaaatcttccagctacatgagccagtgcagtttacgccgtgggtagaacggacgactttgtcatgctgccagcgctggcggtaaccgtcttcccagtcccggttggtatccagaacctggccgtgcccatcggcaaacgtttcgcccttctgcttgaagtagcgaaaccggtccaaaaacttgctcatcgggtatctcctgtatggagcctgtggctctctaaatcgacattgctgatttgcagcgaaggtaacgccctgaaagagagggagaattgataacgatcaagacgacgagggactttcaggcgagggattacaccgaataccaccaaagcggtatctttataaatttcatatctatatgaaatataaagtcatttcaatttcatcctacaaaagaccaggcaaaatttaacatctcaggtattaaggggtagagcgccctggaaagcgatggcaatcacagtgttgcctgcggatttcctcagcagggttttcagtatgttgtaactattttggccaaaaaaaacgcggcccgaaggccgcgtaaacggataatcacacttacttattttttttggtattacggccatataccagccacgtaatcacaacgcaggcgatatagaagatgaggaagaccttcattgcacccgccggagagccggtcagatccagtgagatgccgaacgctttcggaataaagaagccgccaattgcgccaatcgcagagataaagcccagtgctgcagctgtatccgttgccgcttcacgcatcgcctgctcttcgcttccgccctgcgccttcacgcggtccatcgtcagcttacggaagatcacggagatcatctggaaggtagacgcactccccagcccggccgtcaggaacagcaccataaacacgccgaagaaggcgatgaagctcccgccctgtccgtcagcaggcagcgtcaggaacagcagcgcacagaagactgccatcacgacgaagttaaccagcgtcacgcgggtcccgcccagacggtcggagatcatgccgcccagcgaacgcgccagggcgccaataaacgggccgaagaaggcgaattgcaggatctgcacgtccgggaactgcgttttcgacagcatcgcgaagcccgccgagaagccgataaacgaaccgaaggtcgccagatacagcagcgccatcacccagaggtgtccacgcttcagcaccggcagctgttcactcagcgacgccttcgacgcggacaggtcattcataaagaaccaggctgcaagggtgaagatcacgaggaacggcacccagatccacgctgcgttttgcagatagagggaagaaccatccgcctgctcaacgccaccgccgccaaaggctgcaaaaatggagaccgagatcgccaggggcgcgatcagctgcatcacgctcacgcccatattgcccagaccgccgttaatccccagcgcgccgccctgcttcgctttcgggaagaagaagctgatgttcgccatgctggaggcgaagttcgccccggcaaagccgcacagcagggagataatcacgaacacgctgaacggcgtggaggtatcctgcaccgcgaagccgagccacacgcatgggacgatcatgatgcccgtactgaacgccgtccagcgacggccgccgaagaccggcaccataaacgcgtaagggacgcgcagcagcgcgcctgacagcgacggcagcgcggtcagcataaacagctgatcggttgtgaacgtaaacccgactttgggcaggtttaccgccaccgcgctaaacaacatccacacgcaaaacgctaacaacaagcacggcacggaaatccacagattccggcttgctacacgatggccgcgctgttgccagaacgccggatcctctggacgccagtcagtaataacggcaccattttccctttcgggagcggatgagtgactcatagacacctctgattctcgaatgatgctgcaaacattagggttttagggcggcggtaagttgatataaatcaaaggaaaagtgggaggatttgcggcgtaaaataaggcctcatccttagtgagtaggctaattcggtaaaaaagacgtggtttttcacggcactgacggttccctgcagcgcccacctctttccccctactccgttggcaatttaggggtaatcctttattggtatgggtatactccagggtatgcaccagaatagcgccattcctgcaagcaggccacgtcaggagcacgcccactctatgttaaaaagatgcttatctccgctaacgctcgtgaatcagctcgccctgattgttttgctgtccaccgccatcggcgtgaccggcatggcgatctccggctggctggtacaaggggtacagggtaatgcgcatgccatcaacgaggcaggctcgctacgcatgcagagttaccgtctgctggcggcggttccgctgacgcaggacgatcgacctttaatcgatgaaatggagcgcacggcgttcagccccgagctggaaaatgccgccatccgtgccggtcagcaatcccagttgaacgcccttcaggggtactggcacacccagctgcagccaggcctgaaacaggcgcgcagtacagaagccgttgcccaggacgtggcggggtttgtctcccgcattgacgcgctggtctccgcgttcgaccagacgaccgaattacgcatcgaccgggtggtgatggtgcaccgggccatggcgctgtttatggggctgctgctgatcttcaccatcatctggctccgcgcgcgtctgctgaatccctggaaacagctgctggcgatggcccgcgcggtcaccgcacgcgattttacccagcgcacgcacatcagcgggcgcaacgagatggccatgctcggccaggcactcaataccatgtcggcagagctctccgagagctacgcggtgctggagcagcgcgtacaggaaaaaacggccgggctggagcagaaaaacgagatcctctctttcctctggcaggccaaccgtcgcttgcacatgcaggtgccgctatgtgaacgtctctcaccggtgctgaatggcctgcaaacgctgaccctgctgcgcgatctggagctgcgggtctacgatgtggaagacgaagagaaccaccaggaatttacctgtcagtccgatatgtcctgcgatgacaaaggctgccatctttgccctcgcggcctgccgccgctgacctccggcggcacgaccctgaagtggcgcctgacggacagccacactcagtacggcattctgctggccaccctgccaaccggacgccacctgagccacgaccagcagcagctggtggatacgctggttgaacagctgacggccacgctggcgctagacaggcatcaggaaaaacagcagcagctgatcgtcatggaagagcgcgcgaccatcgcccgcgagctgcacgactccatcgcccagtcgctttcctgtatgaaaatgcaggtgagctgcctgcagatgcaggatgcggagatgcccgacagcaacaagcagctgctcagccagatccgcaacgagctgaacacctcctgggtgcagctgcgcgagctgctgaccaccttccgtctgcagttgaccgagccgggcctgcgcccggcgctggaatccagctgtcacgaatttagcgcccggctggggttcccggtgaagctggattaccagctgccgccgcgctttgtcccctcccatcaggccatacatttactgcagatcgcccgcgaagcgctgagcaacgtgcttaaacacgctgaagcaacggcggtcacggtcaccgtcagccagcacgacaatcaggtgaaactgacggttcacgataacggccgcggcgtgccggaaaatgccgaacgcactaaccactatggtttaatcattatgcgagaccgcgcccaaagcctgcgcggtgattgccaggttcgccggagagagacgggcggcacggaagttgtcgtcacctttattcccgagaaaccgcttacaactgctcaaggagatacccatgactaatcaggaaccggcatccatcctgttgatcgacgaccatccgatgctgcgtactggcgtgaaacagctggtcagcatggcgcccgatatcaccgtggtgggcaaagccagcaacggcgaacagggcattgagcttgccgaatccctcgatcccgatctgatcctgctcgatctgaatatgccgggcatgaacggactggagaccctcgacaagctgcgggaaaaatcgctttccggacgcatcgtcgtctttagcgtgtcgaaccatgaagaggatgtggtcacggcgctgaagcgcggggcggatggctatctgctgaaagacatggagccggaagatctgcttaaggcgctgcagcaggcggcggcgggcgagatggtattgagcgaagccttaacgccggtgctggccgccagcctgcgcgctaaccgcgccacctctgaccgtgacgtcagccagctcacgccgcgcgagcgcgacattctcaagctcattgcccagggcctgccgaacaagatgatcgctcgccgcctggacatcaccgaaagcacggtcaaagtgcacgtgaagcatatgctgaagaaaatgaagttaaaatctcgcgttgaagccgccgtgtgggtgcatcaggaacgcattttctaaggattactcctccggcagcagcttccagcgcgggtcgtcatcaggcaatgcgaccagcggctgcaccacagcaagcgtgatctcattggacgagacgcgctggcctttctcatcttctaccaccgccgagaggtgccagcggtttgtcgcaccttcctgttcattccaggcaggtataatcacgctccagccgtctgcgctgttacttttggccggcgacgtcaggctcaatgcctgcgtatccccctgccagtggatctgacggatgccgtgcgtgctgcgaacctgcagcttcagcataacggtctcgccccctttcagatcccacggcggcgtggccagccagacggacagcgttttacgctggcggaactccatcaccggcaggctagtgcgctccggtgaatcgtagcggctgccgcgcagggatcgcgtcgcggcgacctcatcggcggaaagctgcttagctagcggcacgccaaagcggtagttgagcttcagcccaaggttattctggctctcgccgctttcgccctgcttgtgcccggcggtcaacgtgaccagcggaacgggggtatagttaagccccagattggccgcaaccgggttgtggtacccggttccactgttgaacaggtcaacgttatcgccaaagtactgctcaacgctaacgctggtgttcaggtgatgaaaccacggcaaccaggctttagcggtcacgtcatatccgcgcgccatgcgctgctcctgaacgtcagatcgcgcgcgccatccggcaaagggctgatagtagttcgctgagaggcgcagattttccccccacgcttccgctcccagcccggcacgctgcaggttttcatccagaagattatcgtaaaaggtgttgtagcccagcagccatttcccggcgacccagcgctgaccgattccggcgttactgaccaggccatccgtctgctgcgtcaggccaagctggctccagctgaggtaacggttagtatcattccacgggatgaaccagctcccgctgctgccgttaaatttgccgtcattatccaccagcacgttcacgctggcgtttccccagggcgacagccaggactcaatctgctggttcacttccccgcttaccgcgtcgcgcacctgaccaaaggcaaactgacgcgcctgctcgccggtcgtcagcccgttgtcggtcatgctggcttcaccgaaggctttcgccatttcggcgaggtgtttctccccttcgcccgttggcgccgccaggccgagatcgggcagactatccccattattatcaaaggggtgctgcgcctgatgcataaaggaattcggcgcaccgtgaacggctccggccgtaagaagggggagtaaaaacagcaaacgaatgcgggacgatacagccatcaacgtcgtcaataagaacctgtgtttatgaataaactcttattatgttaacgcgataagccctgaaatgcagttctggcggacatttcaggattatcctgaaacagccctttcagctccggcacgcaggaaccacagttcgtaccacagcgcagcttcgcccccagcgcggtgacggaatcacaccctccggcaatcgcctcccgtatcgcctcttccccgacgctgaaacagctgcagataatgcgtcccggatccatcgccttcccgacgctctgcccgttcaacagggcgtggcgttctgcgggcagcacggggggtgaatgaaaagcggcttcaatcaccgtatgcgccagcgccggtaacgcggtaccttcccagaaacccagcataagctggccttcatgccaggccagcacgctgctgcgttcaccggtctgcgcaacctgcagctgccagccccggccgctggcgtattccattacccacgacagcagcggtttatcgcacgccaccgtcaggcgtgaagctttacgccaccagtaaaccgaagagggcatttccagcccttcgcgggcatagagttctccctgccagacgggctgccagggctggattctgacggcggtttgtttactctccggctggcccgaaaccggatcgcagcgcccttccaccagcgcattcaccttcccctggcgggcaaactcagcgttccagtgcatcggggcaaaagcgttcccttcacgctgggcgtcgctgatgcgcactcttgctaccatgacgccgcgcggcgaactgatgcgcgccagctggccgtcgcacagggaaaaccgaacggcgtctgcggggcaaacctcaacaaagggttcggcgatatgctgcatcagtctggccacatatcctgttcgcgtcatggtatgccactgatcgcgaatgcgccccgagttgagaatcagcgggtacaacgcgctgaccgttgcaccgtgcgactgtgggtcaacgggaacaatgtttcggcacggaaaatctcccccaggccactgccagggctcaagccgctcccactcctcacgggttagcgtagccaggtcgtgaaggtttaaggcccgcgcgccgtcattttcaaaggccgtcagcgccgcatgctcgcaaaaaatctggtggggatgcagccaggcaaaggcgtcgccgtgccccagccgtttcgccacctgcgcgacgatccaccagtccggctttgcctcaccgggcgcgggcagaaacgcgcgctggcgcgaaatgcgtcgctcggaattggttaccgtgccgtccttctctccccaggccagcgccggaaagcgaatatgggcaaaccggctggtgtcggtatcattcatcacctcagagacaatcaccagcgggcagcgccccagcgcctgacacaccgcgtggctgtccggcagcgagacggcaggattggtgcccatgatccacactgccttcacctcgccgcgggcaatggcgtcaaacagctccaccgccatcaagcccggcgtctgcgcaagccgttccgttccccagaaacgcgccacccgcgagagatcgtccggctcaaagttcatgtgcgccgccagctgatttgccagcccgcccacctctcttccgcccatcgcgtttggctgtccggtcagcgaaaacgggccgcagcccggacggttaaatttcccgctggcaaggtgcacgttaatgatggcgctgcatttgtcgctgccgctggaggactggttgattcccatggtgtagagcgtgatggcccggggcgccgtcataaaccagtcgtaaaacgtaccaatatcctgcggcgagaggccgcaaaacgccgccacgcgtgatatcggccacgcgtctgttccctgaatgacattaagcagaccgacgaacagcccggcgtcgctgccgggagtgagcgccagatgcaggtcagcaatttcacaggaggcggttctgcgcgggtcgatgaccaccactttcatctccggattgttgtgctttgcctgtaccacgcgctgatacagcaccggatgcgtccaggccgcgtttgagcccaccagcaccaccagatcgctgttttgcacatcctcgtagctgcacggcacgacgtcttcaccaaaggcgcgcttgtagccaacgactgccgatgacatgcagagccgggagttggtatcaatgttcgccgcgccgataaaccctttcatcagcttattggcggcgtaataatcctcggtaagcaattgcccggacgcgtaaaacgccaccgcctgcggcccccatttgtcgataatgtcctggaggcgctcgcctgccgctcccagcgcctgcgcccaggccacctcagccccgtcaacaacggggcgcagcaatcgcccctgtaaccccattgtttcccccagggccgatcctttcacgcacaagcggccaaagttcgcaggatgggtttcatccccccgaacgctgaccgtttcaccgtccacgcgggcgaccacgccgcagccgaccccgcagtagggacacgttgtccggatttccgtcatgaggcctccgcacgcattaccagggcatcattaccgacccacaccttgccgttctcaattttgaccggccaggcgcgcaccgcgggttcgccgttctccacctgacagccgtcgcgcaggcggatacgctgcttgtagagcggggaaatcaccaccggctcccccgccgcatcgccaagaatgccgcgggaaagcacgttcgcgctgctgccaggctcccgatcgtcgagggcgtaaacggttttgccaaagcggaacagcgcgatcggcttacgcccaagccgcgcgccgattcccgcctgctcggggatatcgtcgatgccgcagatttcctgccagcgtttaccttgatccgctgcggtgtcgttcaccgccgtgcggaacagcgccagacggttgggatcgttaagcgtggtttgccattcgcactgatacgtctctaccacccgcgccatctcctgttccagctcgtgggcgatgcccaggctgtcgttgaggatcacctcccgcaggtagtcgagaccgccttcaaggttgtccatccaggtgctggtgcgctgcaggcgatccgccgtgcggatgtagaacatcaggaaacggtctacggtgcggatcagcgtgtcatcatcaagatcgctggcgaagagatccgcatggcgcggcttcatgccgccgttgccgcacaggtagagattccaccccttatcggtggcaatcacccccacgtctttactctgcgcctcggcgcattcgcgggtacaccctgagaccgccattttgattttgtgcggtgcgcgcaggcctttgtaacggtgctcgagcctgaccgcgaggccggtggagtcctgcacgccgtagcgacaccaggtcgacccgacgcaggatttcaccgtgcgcagggatttgccgtaggcatgcccggtttcaaatccggcttccaccagcgcctgccagatctccggcagctgttccagcgtggcgccaaacaggtcgatacgctggccgccggtgattttgctgtacaggctgtagcgttttgcaatctggccgatggcgatcagcccgtctgcagtcacttcccccgcaggcatgcgcggcacgatggagtaagtaccgtccttctggatattggcgaagtagcggtcgttggtgtcctgcagcggcaggtgtgccggtttcagcagatactcgttccagcaggaggcgagcactgaccccaccagtggcttacaaatttcgcacccgtgtccctgaccgtagcggctaatgagctggtcaaaggtgcggatatggttgacgcgcacgaggtggtaaatctcctgacgcgagtacgggaagtgttcgcagatgtcctttttcacctccacgccctgcgccgccagctggaactccatcacctgcttcaccagtgcgctacatcctccgcagccggtcgccgctttggtgcactgcttaatcgcgccgatatccgttgcgcccgcacttaccgcctgacagatatcgcctttgctgacgttatgacacgaacagatttgtgcgctttccggcagcgctgccacgccgagcgcttttggcgcactgcctgacgacgcgggtaatatcagcgtttccggctcttttggcagggctatcccgttgagcatcatctgtaccagcgtggcgtattcgctggcatcacccaccagcacgccgccgagcagcgttttgccgtcgtggctgaccacgattttcttgtagatttgctgcgggccgtgcgtccactggtagctcagcgcccccggcgtgcggccgtgagcatcgccgaacgaggccacgtccacgcccagcagcttgagtttggtgctcatatccgcgccggcgaaggttttctcctctcccgccagcgcggcggcggccacccgcgccatctggtagccgggcgcaaccagcccgaagattttcccttcccacagggcgcattcaccaatggccagcacgtccggatcggaggtctgacagcggtcgtcaatgccgatcccgccgcgttcgccgatagccagcccgctgctgcgcgccagcgcgtcctgcggacgaatgcctgcagaaaagaccaccatgtctgtttcaagctgttctccatcggcaaagcgcagcaccagcccgccgtccgcggcggcgatctccgtcgttgctttactggtatgcacaccgacgccaagcgcctcgattttcttgcgcagcatcgccgcgccgtcgttgtcgagctggaccgccatcaggttaggcgcaaactccaccacgtgagtttccagcccgagctgcttcagggcattcgccgcctccagccccagcagcccgccgccaatcacgacaccgcggcgtgagcccgccgcatgcgccgcaatcttgtccagatcgtcaagggtgcggtagacaaaacagcccggcagatcgtttcccggcacgggcggcacgaacgggtatgagccggtcgccagcaccagcttgtcccagtgggtttcgtgcccgctggcgctacgcaccacgcgcgcgtcgcgatcgatagcgacaatctgctgcgacaggcgcagctcaatgccgttgttggcaaagaaatccccctccaccagcgaaagcgacgccgcgctgcggccgccaaaatattccgacagatgcacgcggtcgtaggcggcatagcgctcctcgccaaagacaacgatctgatactgctgatgcaaattgcggttaacgcagtcttcgaggaaatgatggccgaccataccgtgcccaaccaccaccagagtaggttttgtcatagcgttctgtcctgcaacctgcggttgcgtagtgaaacgatcgaacagccagtccgcgtgcgcgggcgcagccgttgccagtaaatcggtaaatgttgccgcgctgcggcagtcccccatcagcagcacgccagccagcgccccctgatggatcagtaagcgacgatagtgacgggtcagcggatcccatgcgctccagaccacatcgccctcctgctctgccgcgcgaccgaggctgaacaactccacgccggtcaccttgaggcgcatgccgttgtcggtcagggcaaatggcgcggtaacgtctccggccagccgtgcggcgaggatatccgcctgcgccagacagggggcgaccaggccaaacgtcttgccgtcaatttcacagcattcgccaatggcgtagacgtccggcgcggaggtttgcatctggtgatccaccacgatgccgcgcgcgcagcgaatgccgctggcctgcgccagtacgacgttgggctgcacgcccgtcgccagcaccacgcgcgcggcggtgacgctgcgtccgttcagcagcgtcacgctattcccgtcaatcgccgcgatgccagaggcgagttcacagcgcacgccccgcgccgccagcgcctcttccagcagcacgcccgccttctcatccagctgctgctccatcagccacggaccgcgatgaacaagggtgacgttgtcccctgagcgcgccagcgctgccgccgtctcaaccccgagcacgccgccgcccagcactaccgccggaccggcgatcgcccgaatggcccggatatcctccagggtacggaacgtgaagacatgcggcgcatcgcagccggggatcggcggaacaaagggcgttgatccggtggcaaacaccagcgcatcccagcccagcgtgcgggcggtggtttgcacttcccgcgtgtccacattcacggcgagcgccttttccccccgcagcaccgtcacgccccgttcctggtaccagtcgtcattctgaagacagatgcccgccgccgttttttcaccgcccagcaccggcgaaagctggatgcggttataggcatgctccggctcgtcaccgatgacggtaatggcgaaacgatcggcagcacgcccggtgagcgaggcaatcagccgcgtggccgccatgccattcccgataatgaccagtcgcatcaaagccccctcgctacgccgctttcggctgcttttcatagaggaaatgcaggatctgctggcgcatgtggtgatagcggctgtcgtcagccaactgcacccggttacgcgggcgcggcaggtcaacgtgcaggatctcgccgacggtcgccgccgggccgttggtcatcatcagcacgcgatcggagagcagcaccgcctcgtccacgtcgtgggtaatcagcacgatggtggtgttcagcgcctgctggatctgcatcaccgagtcctgcagatgtgcgcgcgtcagcgcatccagcgcgccgaagggttcatccatcagcaggactttcggcttcatcgccagcgcgcgggcaatcccgacgcgctgcttcatgccgccggagatctcccccgggcgcttgtgcagggcgtgccccatctgcacgcggttgaggttgtgctcaatccactcccggcgctccgccttgctcatgctgtggcgaaacacgtgatctaccgccagggccacgttgtcgaagcaggtgagccacggcagcagcgaatggttctggaataccaccgcgcgctccggacccggcccggcaatttcgcggttatcgcaaatcagcccgccttccgtcggcagcgtgatcccagcgataaggttcagcagcgtcgatttaccgcagccggagtgcccaatcaggctgacggtttcgccctcatggatatcaaaggagacgttctgcagcgccagaaattcgccgctggcggtggaaaaacgctggctcacggcctggacctggattaatggtttcatgttcgctccttatttttcctgccagctaaagcgacgggcgatcagcatcagcccctgctccaacagcagcccgaccacgccaatgatgacgatggcgatgagaatgttttcgacgttgaggttgttccactcgttccagatccagaaaccgatccctaaaccgccggtcagcatctcggcggcgacaatcaccagccaggcgatgccgatggagaggcgcaccccggtcagcaccgcgggcaacaccgccgggaagagaatgcggcgcatgatggtccactcggaaagctgcagcacccgggccacgttgaggtagtcctgcggaatacggcgcacgccttcggcggtgttgatcaccatcggccagatggagcagataaaaatggtccagctcgacgcgggctccgctttctggaacagcagcaggccgatgggcagccaggccagcgggctaaccgggcgtaacagcgcgatcagcgggccgaacatgcgcgaaaaaaaggtgaagcggccaatcaggaaaccgagcgggatcccggcgaacgcggccaggccaaagcccaccgccacgcgctgtaatgaggcgagcacgttccagccgatgcccatgtcgtttggcccgtcgcgataaaacggatcggcaaacagggtaatagcggaatcgagcgtgctgagcggcgtcgggaaacctttgctgataatcgccgccagctgccagagcaccaccagcagtcccagccccagaaaagccggaatgatgcgctgaaggatcgcgttaatccgacgcgcaaacgtcggcgtacggcggcgaacctgcaccggaggcaggacaatcacctctccactctccggcgtctcgtgtgattttgtcttttgcagatgctgcataatcaggcccctttacggtgaatggcgaaacggctggcatatccttccgggtcggtaccgttccagacggtgccgtccatcaatgtgctgctgcgtagtggtgaagtcggtgtggtaatgccccccaccgccgtggcggcatcctgccagaccgccgtctggttaatgcgttgtgcgatgcccgcatagtccggggcggctttgagcaagccccagcggcggaactgggttaagaaccacatgccgtcggagagatacgggtagctgacggccccctcgttgaagaagcggatcgggtgcgcgtcctgccagcgctggcccaggccgttgtcgtactcgccgagcatgcgtccggtgagatactgctctttgcagttgagccacgcccggcgggagaggatctgcgcggtttcgcgtttgttttccggggaggcctcaatccagcgcgccgcctccagcactgcgctcaccagcgcccgggcggtgtgcgggtttttctccacccagtcgcgacgcgtcccgaggattttttccggatggtcggcccagacagactgcgacgtggcggcggtaaaaccgatgcggtcgttgatggcacgcgcgttccacggctcgccgacgcaaaagccgaccatgttgccaatgcgcatgttcatcaccatctgcggcggcggcaccaccaccgtgcgcacgtcgtcaaaggggtgaatgcccgcgctggccagccagtagtagagccacatggcgtgcgtcccggtcgggaaggtgtgcgcgaaggtataggtgccaaccgcctgctgcccaatccgctttttcagcccgtcaaggtcacgaacgcccttctctgccagatcgctggagagcgtaatcgcctgaccgttctggttgagggtcatcaggttagccatctgctgtggcttgccggcgatgcccagctccagtccgtacagcaggccgtaaagaatgtgcgcggcatcgagttcgcccgccaccagcttgtcgcgcaccgccgcccagctcgcctctttggtgggcacgatggtaataccgtattttttatcaaaccctttcagcgccgcgataaccaccggggcacagtcggtcagcgggataaacccgatgcgcactgtttcctgctccggtttatccgagcctgccgcccatgcggcctgcatgacacccggcaacagcattgcaccactcgccagcatgctggcctgcaaaaaacgccgtctcgacaaatccgccatgaccactcctgaaaaaaaaccaaaaaaaagcgcccacggtgccgaagcaccagtggacgcctttatcccgaagacggatgcaccgccgttggcgcatcgtcaaaaatggttaatctgataatgcaaagtgaatgccaggttttaacacaccgtttcttgcggcgcttaccgttattccctcgcctttacgcaccgcaaacaggcataaaatgcccactgaccgtgcagctactcctttggtgttacctgccatacattcttcaccatgagcagcgcgcgggcgatatccaccatcctttggttcttgtccatcgccattttgcgcagcgccgtccaggcctgttcctcactcatattctggtgggtcatcagcacgctcttcgctttatcaatgattttgcgctcttcaagcgtatcgcgcagcgacgcaagctgacgtgagagctgctctatctcgcgcgcctgctggcgaaccagggtaagcaacggtttttccggatagcggatcggcgggtcatcctgttcatcgccggggagcgcgtactcatcgtcacggtgaatgcattcgtccaccgcgaccatcagatcggcgatgatcgtctcctccagcgtgcgcagatgctcaaggcgcgcggtttgcagagcaaaccaggccagcgccgtaaggccgttatcggcggcgggctggcgggtacaggccacgcgccggagctgctccgtttcacgatcgggctgacagtgcattgaaaaggtggtctgaacgtcagcggagctgtgtgagagaaagatctcaaagcaggcctgctgcccgtcaatgcggtcaaccagcctctgacgagtcacctcatcgaaaaaaccctgcgtgaagccaatcgcccccagcgcccgctcctgtcccgccagctccttgccctgcatcaggctataaagcgcgacaaaacgtcctgcgatttgcggatcgtcaatgctgtcattaagctgcggcacgatactgagcagatggcgaagcatgcgggagtagtgttccatcgcctggggtgccgttactgtctgctgaatcacaccgtcacgcagcgcgggaagcgtctccaggctcaggagcgcgccgccgatgcgttcacagacggcacttcccggaatcggcgactgtgtttcaagaatggcgtaaagggctgagaggttttcatccaccagcgcccggctggctttgcattcgggagcgtacagcttgccctgtgagcagagccagacgttggacgccccgcgctcgcactgtaacatgtgcaccagttggctaatgccgtgcacaagcacgcccagctgtgccagcttgctgaactgctcctggcgcatcatttttgcgcgcgtgagccattcggcagcgcctggcgaaatgcctgccattaatgtcatgcttactctcccggacagcgaaactccggggaattaagcaatattcgtgcctttataagaacaggagtcaacatgcagaagattgtgatcgtcgccaacggtgcggcctacggcagcgaatcccttttcaacagcctgcgcctggcgatcgcgctacgtgaaaaagagagcgacctggcgttacgcctttttttaatgtcggacgccgtcaccgccgggctgaagggacaaaagccggccgagggctataacattcagcagatgctggagatcctgaccgcacaaaacgtgccggtgaagctgtgcaaaacctgcaccgacgggcgcggtatcaccggactgccgctgattgatggcgtagaaattggtacgctggttgaactggccgagtggacgctgtccgctgataaagtattaactttttaataataaacccgtaaaaatattattttcttatggacgcggtttcagcatcaagtttacctgcggggttgccgataggcatggaaacaacacagcaggtatttcacttatgttcagatcgattcgtgcacgcatcatcgcggcgacggcaggctgtctggtcgtcgcccttctcctcaacaccgttattaacttccaggtcacacgccaggataaccagcagtcacagcgcgatatcctgaccagcaccagcgccagccataacatggcgattgccgactgggtaaaaagcaagatgacggttatcgcctctgcccagaccgttgcgctgagtgacgacccggttccggtgtttaaacagcttgcgcaggcgggtggattcaccaacgtttatgttggctatgccagcaaaacggcgaaattctctgagcccgcgggcgtacctgcggattatgacccgaccattcgcccgtggtatcagcaggtggtcagcacggacggtccggtcgtcaccgcgccttacgttgatgccggtaccggtaaactggtggtgaccttcgccgtgccggtgaaagagaatggcaccctgaaagcggtggtggcgggcgatgtggccatggacagcgtggtggcgaacgtgcgcgggatccatccaactccgtccagcagcggcttgcttctgaacagtgacggcagcgtgattgcggctaacgatccggctctgacgcttaaaccgtttgctgagaccatcaaaggcatcgattttgctgcgctgaaaagcggtaaccttgtcgacggtacgctgaacgacgtcgaaaaaaccttcgtggcaaccgccgtgccgggcacaaactggctgctggtcgtcgccctcgacaacggtgatgccacttccggcatgcgttccctgcttaaggcatcggcgatttcgctggtgatcctggcgctgctgagcgcggccattgttcacctcctgattgcccgtctgctgaagcgcctgtcggacattcgcgacgcgatgcacaacattgccaacgggactaacgacctgtcgcagcgtctgcctgacagcggtgaggacgaggtggcgcagattgcccaggcctttaacgccttcagcgataagctgtcggtggtgatggtgcagctccgtgatgccagcgagtcggtgaaaaacgccgctcaggagattgcggcgggtaaccaggatctctccggacgtaccgagcaggcggcgtccagcctgcgcgagacggcaagcgccgtggagcagatcaccgcctccgtgacgcagtcgaacgaatcggcggcggaagcgaacgaccaggcgagcaaggcctccgcggccgcggcgcgcggcggcgaggtggtatcccaggcgatcagcaccatgcagtccatcgaagtcgcgtcggctaaaattggcgacatcaccagcgtgattgacggtatcgcgttccagaccaacattctggcgctgaacgcctccgtcgaggcggcccgtgccggggagcaggggcgcgggtttgccgtggtggcgggcgaagtgcgtaacctggcgagccgtagcgcccaggcggcgaaagagatcaaatcgctgattgattccaccaccgacagcgtggccaccggctcccgctacgtgcatctggccggggaaagcatggacgagatccgctccagcatcggcagcgtctccggcatcatgcgcgaaatctccatcgccaccagcgagcagatgaaaggcattcacgagattaaccacgcggtgacccacctcgaccgcatggtccagcagaacgccgagctggtcgtgcaatccgccgctgccgcgggcgccctgcagagccaggcgggcgaccttgctgaaaccgccggccatttccgcatttaattttctactggcgcgcgtttagcgggtaaaacgcgcgtcagcggaaattttgaggaattttgtcatttttgtttaatcgttatgccattttttgatcaaaatcagcatccctccccctcccctttggtgttatgccatgagtgaattgtgaacaacatcacgctcggatatggcagcagggagagcgttgtttaagactacggggtaaaaaatggcactggtaaaaacaagtttgaaactgtttggcggggatacggtagtggtgcgttgctcagagcgctgccgtattcatctgatgagtgcgaaagcacaaaaacaatcccaggcggatattctcaccgtgcaggatgataacgcctggcttaccgtgccgtataccggcacctgggatgtgctgatcgacagccacagccagtcgctggagcattctgtcagttacgtagcagcttaaattacgcgcccggcgagccgggcgtattatcaggcaaaacccggtcgcagcgtgccgttgagcgggtttccttccagcagcgccttcaccttcaccaccagctcattcagacaatcgtccttcatgccgaggcgggtaagctcctgatcgagagagaagagatactgcgcgttggtacccagcggcccgctggcggcggcaattaacggggcaatcacctgcgtgcgggtgtccgcttcatacagcggatggcgcgggtccataataaacaccagcgcattgacggtgcgtccgtcgtccagctccagcttgcaccagctcggcatgtagcagccggtgatcatctcacgcttccagagcagcgtaagctcctcttccagggtggcatccgggaggcgatacgccacgcccgtggtgcgtccgccctctttcagtgcaagcatacgcccgggctggcacgcgctgccgcgtccggccgtcaggcgcaggcaaaatgcgcgatgccagccgggcaacgtgcccgttgccgattcgacaaattcgagcgccgggttccacatcagggagccgtagccaaaaatccataccgggccatcatccgggcggcaggcaagcgtggcagcgagcgacgccgcacgttgttcagctgaccagagaagcgattcctcaatagcaccaaatgccgtcttacaatctgccttcattaagaaatcacgcgttaacactttccacctccgccactgcatgcttccttgcgacatctgtaattcgccttcccggccttaggtgctggtcattttgccagcagttgaataacgataagcaattagcggaccagttgcaatacaacggcagttcaaccgcctgaaaagtcaaaatgaaggcagcgaattattacagggctatttctttttatgccatttatcgtcgtctcctttttcatattcatgttttacagcggcccaggcgactttgtgtgccgtctcttcacggctggcatcatcccggcgatcgtccttatctttgtactgttcccaggcactgttaaacgcctctttgtagatatcctgcgcgtgagcgggcagcacgttttgcacattatcgggtaattcgcgtttcgttttataaggcatcactcacctctcttttggttaaagagataagtgtggacgacgatatggcagcgtgccacccacacttcatttatgaatgatcgaaaatattaacttattgttatttaacaaatattatgagaatatggtgaattacaggaatcaggcctgataattattaaaaaaggtaaaattaagtaaaaaataaagggcatttaacagagatctgttaatttaatgccctcaaaaatctatctataattacaagcacctgcattgatggagaagcacatgacagcaacacacgaggcggtaaagacccgccacaaggagacgtctctcattttcccggttctggcactggctgtgctgctcttctggggaagcagtcagtcactgccagtggtggttggtatcaatattcttgcgctggtcggtattttaaccagcgcctttagcgtcgttcgccatgcggacgtactggcccaccgtctgggcgagccctacggatcgttaattctcagcctttccgtcgttattctcgaagtcagcctgatttccgcgctcatggcgaccggcgatgccgcgccgacgctgatgcgcgacaccctttactcgatcatcatgattgtgacgggcggcctggtgggcttctctctgctgctgggcgggcgtaaattcgcgacccagtatatgaacctgttcggcattaaacagtatctgattgccctcttcccgctggcgattatcgtgctggtcttcccgatggcgctgccgggtgcaaacttctccaccggtcaggcgctgctggtcgcgctgatttccgcagccatgtacggcgtgttcctgttgattcagaccaaaacgcaccagagcctgtttgtgtatgagcatgaagacgacagcgacgacgatgacccgcaccacggtaagccgtcggcccacagcagcgcgtggcatacggtttggctgatcgtgcatctgattgcggtgattgccgtcaccaagatgaacgccaacccgctggaaacattgttaaccgagctgaacgcgccggtcgcctttaccggcttcctggtggcgctgctgatcctgtccccggaagggctgggggcgctgaaagccgtcttaaacaatcaggtacagcgcgcaatgaacctgttcttcggctccgtgctggcgaccatttcactcaccgtgccggtggtgacgctgattgcctttatgaccggtaacgaactgcagttcgcgctgggcgcgccagagatgattgtgatggtagcctcgttgctgctgtgccagatttcgttctcaaccggacgcaccaacgtgctgaacggggcggcgcatatggcgctgtttgtggcttacttgatgacaatttttgcgtagcctttttgcccagcggcgcttcgcttgcagaacctacgggttttgtaggccgggtaagcaaagtgccacccggcaatatgccccataaaaaaacccgccgaagcgggtttttttattatttgctggtatccagctcatcgaagctcttgaccagatcgtcaattgctttgatctgtttcaggaacggctccagcttatccagcggcagcgcagatgggccgtcgcattttgcgttatccggatccgggtgcgcttcaatgaacaggccagccaggccggttgccataccggcgcgcgccagttcggtcacctgagcacgacggccgccggacgcagcgccaaacgggtcgcggcactgcagcgcgtgggtcacgtcgaaaatcaccggagactgattagagacgtttttcatcacgctgaagcccagcatatccacaaccagattgtcataaccgaagttggaaccacggtcgcacaggataaccttgtcgttgccaccttcgataaacttatcgacgatgttgcccatctgacccgggctcacgaactgtggttttttcacgttgatcacggcaccggttttcgccatcgcggcaaccaggtcggtctggcgagccaggaacgccgggagctgaatcacatcaaccacgtctgccaccggctgcgcctgagcggcttcatgcacgtcggtgatcactttcacgccaaaggtctgcttcagctcctggaaaatcttcatcccttcttccaggcccgggccacggtaagagttgatggaggagcggttggctttgtcaaaagaggctttaaacacgtacgggatgcccagcttctgggtcacggtcacgtagtgctcgcagatacgcatggcgaggtcgcgggattccagcacgttcatgccgccaaacagcacgaacggcaggtcgtttgctaccttgatatcaccaatgctaaccactttttgtttcataggatcgccttattcaggtgtgaatcggaattaagattaatgcagtgtaatttgcttgtgcgagatcgcgttgatctgcgcacgaatcatttcgctaatggggtcttccggacactgctcaacgaaatagttcagatcgtttagcgccacgtgttcgcagtcgagctgagcatagattagcccgcggtcgcgaatttcgtacgggtcttccggattaaactgcagcagcacttcgctggcgcgcagggccagctccatctgacgctcttccattaacgcagacttcagcgtatccagcagcttgcggatcacttctgcgttatccgcctcgtcgagatcttcgttgaagagctcagccaccgggctgatattgcctttcagccacacgtccagcgtatgttcatccagcgtatcgccgttgaagggattaatgagccacatctcaccgtccagccactccgcacgcaggatcatctgcgtcggaaaaatgaccggcaccagtggaatatccaggcgatgcgcaacccaaagcaaaatagaacccagcgcaacggcgctcccctgacgattttttaagacctggtccagccataatgcgtcagacaggcgatacacgccccgcgtgtcgcagaaaccccattcgccgtagaaaagctcaagcagcttctctaattgccagtcctgcgggcgcgcctgattgatctcttcacgcgccaggctgaccagattctccagctcatcgtagacgtactgcgacgtaaaatcgtcgcggatcatctcagaaatcaggatcatgccatcgcaaagcggcactttattaaattcgaaatcggctaaggacttcatgacttaccccagtaacgaccgagcgtacagcgacgcccgggcgagataaaactcaaaacgatgtagatgataacgccaaaccgcctttcagtcagccttacgcctttatcagtacctgcgctcataaccactgccccagcgtcaggcgttcgttgccgccgtagtcgcggcaggttttgacaccggcgtagcccgcctcggtaaagagcgcccgcacggcttccccctgcgtccagccatgctccaccagcagccagccgccggaaagcaaatgttgtcgtgacgttgtcacaatgtgctcaaggtcggctaaaccctccctggcggcgaccagcgccgtcagcggttcgaagcgcacatccccctgcgcaaggtgcgggtcacgctcgtcaatatagggtgggttactgacaatcactccgaacgtctgcttctccagcgcgctgaaccagctgctttgcagcaccgtcacgttggtcaggccaagacgttccacgttacgctgcgccagcgccaccgcgtcgggcatcacatccaccgccgtgaccgcgcagtcgggccgttcggtagcgagcgccagggcgatggccccggtccccgttccgagatcgagaatgcggcaggacgatgcgggtaagcgcgccagcgcctgttcaaccagacactcggtgtcgggacgcgggatcagcgttgccgccgagacgtaaagcggtaacgaccagaactcgcgctcgccgacaaggtgcgccaccggctcgccggttttacggcgggcaagcagcgcggcgagccgggcttcctgttccgcggtcagttcagtttcgccgaaggccagcaggtacgtgcgggctttacccgtcacatgctcaagcaaaatttcggcatcgcgtttcgggctttcgctttcggaaagctcaccggcagcctcacgtaaccagcgctgaaaatccattattcctgctcggacagtgccgccagctggtcggcctggtattcctgcacgataggctcaatcagcatatccagcttgccttccattacttcgtccagacggtacagcgtcaggttgatgcggtggtcagtcacgcgcccctgcgggaagttgtaggtgcggttacggtcgctgcgatcgccgctgcccagcaggttacgacgcgtagacgcttccgcctgctggcgtttcgccatttcggccgcgtggatacgcgcgcccagcacggagagcgctttggctttgtttttgtgctgggaacgctcgtcctgacactccaccacgatgccggtcggcaggtgggtaatacggatggcggagtcggtggtgttaacgtgctgaccgcccgcgccagaggagcggaaggtatcaatacgcaggtccgccgggttgatgtccggcagttcagcttccggcagctccggcatcaccgctaccgtacaggctgaggtgtgaatgcgtccctgagattcggtggccggtacgcgctgcacgcggtgaccgccggattcaaacttgagacgaccatacacgccgtcgccgctgatcttggcgataacctctttgtagccaccgtgttcaccttcgttggcgctcatgatctccacgcgccagcgacgcgattcggcgtagcggctgtacatgcggaacagatccccggcaaacagcgccgcttcgtccccgccggtcccggcgcggacttccacgaacgcgttgcgttcgtcgtccggatcttttggcagcaacagcacctgaagctgctgctccatctcctcagaacgcgctttcgcatcctgcaactcttcctgcgccatctcgcgcatttcaggatcgtcgagcatcatctgcgcggtttcgatatcttcctgaacctgtcgccagtcggtaaagcatttagaaacatcacttaactgcgcgtattcacgtgaaagtgcgcgaaaacgttcctggtccgcaatggtcccggcatcgccgagcagcgcctggacttcttcatggcgctcgtgcagagcttccagtttagcgacgatagaaggcttcataggcgtaagtgcaccttgtcttagaaaatgggtatagggcgctattccagcccgaggctgttgcgcagaatagtcaggcgttcatcatccccgtcacgggcagcctgctgaagagatttggttggggcatgaatcaggcggttagtcagtttccacgccagatcctgcataatagcctgcgcatcgccgccctgctccagggccgctaacgctttggcagtcaggtcatcacgcacctgctccgcctgcccgcggtactcgcggatggtctcgctgacgctttgcgcgcgcagccaggccataaactcactggtttcctgctcgacaatggtttccgcctgcaccgccgccgctttacgctgcgcgaggttgtgcgaaatgatgctttgcagatcatctacgctgtaaagataggcgttagccagcttgccgacttctggctccacatcgcgcgggacggcgatatccaccagcagcatcggctgattgcggcgggacttcagcgcacgctccaccatccctttgccgataatcggcagcgggctggcggtcgaactgataataatgtccgcctccttcaggcgttcatcgatgtcgctcagggcaaccacctctgcccccacttcatccgccagcacctgcgcgcgttcgcgggtgcggttagcgataatcatctttttcactttatgctcgcgcagatggcgcgccacaagttcgatggtttcgcccgcgcccaccagcatcacggtgacggtggagagggattcaaagatttggcgtgcaagggtgcaggccgcgaaagcaacagaaaccgcactggcaccaatgtcggtttcggttcgcacacgcttcgccacggagaatgacttctggaacatgcgctccagctcactggccttcagatgccctttttgcgaatccgcaaaggcttttttcacctgacccagaatttgcggctcgcccagcaccagcgaatccagcccgctggccacgcgcatcagatggctgacggcatcgttgtcctgatgccagtacaggctgttgcgcagctcgtcttcattgagattgtggtagtcgcataaccagcggatcagcgcgtcgtgcaggttgtcctgctcttccacgcttaaatagagctcggtacggttgcacgtcgagagcaccacgccaccctgcaccatcggctgtgcaagcaggctatccagcgccaggtcaagcgtatccggcgaaaacgtaacgcgttctcgcagcgaaaccggggctgttttgtggttgataccgagtgctaatagggtcatgttgagcgggagtagtaccagcgttaataaggttagcaggacgcatcatacaggatgcgcgagatcaataaaagagacagccccctttcggagtaataggttacacaacgctttgagataatttgaacgtagacggtagcccccttcgacgctagcattaacagttataactgcaacgtatctcaaggatttgtcctcattatgacccgactgattcgcctgctgcccctggcggcactggttctgaccgcgtgtaccgtcacccaaccaaaaggcccgggcaaaagccctgattcaccccagtggcgtcagcaccagcaggacgtccgtaatttgagccagtaccagacccgcggcgccttcgcctatctctctgatgagcaaaaagtgtatgcccgtttcttctggcagcagacgggtcaggacaactatcgcctgctgctgctgaacccgctgggcagcaccgagctggagcttatcgccaaaccgggcgaagcgcagatcaccgataacaaaggccagcactacaccgcaaccgatgccgaagagatgattggcaagctgaccggaatgcctatcccgctgaacagtctgcgccagtggatccttggcctgccgggtgacgccaccgactacacgcttgacgatcagtaccgtctaagccaggtgaactacacccagaacggcaaaacctggaaagtggtgtacagcgactatgacagcaagagtaaaccgtcgctgccatccaacatggaactgacccagggcagccagcgcatcaagctgaaaatggacaactggatcgttaaatgatgacccactggccctctccggcaaaactgaatctgtttttatacattaccggccagcgcgctgacggctatcataccctgcagacgctgtttcaatttattgactatggcgacacaatttctatcgaactgcgccaggacgggcagatttgcctcctgacgccggtcgacggcgtggcgcatgaggacaacctgattgtgcgcgctgcgcgtctgctgatgaacgccgctgcggaatcgggtcgtctgcctgcgggaagcggtgcggacatccgtatcgagaaacgtctgccgatgggcggcggcctgggcggaggctcatccaacgccgctaccgtgctggttgccctgaaccacctttggggctgcgggctgtcgcaggacgaactggccgccttaggcttgaggctgggtgcggatgtcccggtgtttgtgcgcggtcatgcggcctttgctgagggcgtgggcgaaatcctctccccggtcaacccgccggaaaaatggtatctggttgctcaccccggcgtgagcattccgaccccggtcatctttaaagatcctgacctgaaaagaaataccccgattcggtcaatagaaacgttattaaattgtgaattcagcaacgattgcgaggatatcgcaagaaaacgttttcgcgaggttgatgcggtgctttcctggctgttagaatacgcgccgtcgcgcctgactggtacaggggcctgtgtctttgctgaatttgacaccgaatccgccgctcgtcaggtgcttgagcaagcgccggtttggctgcatggttttgtagcgcgtgggatgaacatttcccccctacagcaggccattctggcgcagactgagtttcggtgacaacgtcaccctgttccagacgttgcatcgcgctctttaatacaccgcctggatagcctttgcctggcccgcacagtttacggcgaacgctatccaccactggacgcatgcctgaggttcttctcgtgcctgatatgaagctttttgctggtaacgccaccccggaactagcacaacgtattgccaaccgcctgtacacttccctcggcgacgccgctgtaggtcgctttagcgacggcgaagtcagcgtacaaattaacgaaaatgtacgcggtggtgatattttcatcatccagtccacctgtgctccaacgaacgacaacctgatggaactggttgttatggtcgacgccctgcgtcgcgcttccgcaggccgtatcactgctgtaatcccttacttcggctatgcccgccaggaccgtcgcgtccgttccgcgcgtgtgccaattaccgcgaaagttgtcgctgacttcctgtccagcgttggcgttgaccgcgtactgaccgttgacctgcacgcagagcagatccagggcttcttcgacgtcccggttgataacgtattcggcagcccaatcctgctggaagacatgctgcagctgaacctggataacccaatcgtggtttctccggacatcggcggcgtggtacgtgcccgtgctatcgctaagctgctgaacgataccgacatggcgatcatcgacaaacgtcgtccgcgcgctaacgtttctcaggtgatgcacatcatcggtgacgtggctggccgcgactgcgtgctggttgacgacatgatcgataccggcggtacgctgtgtaaagcggctgaagcgctgaaagagcgtggtgccaagcgcgtattcgcttacgcgacccacccgatcttctccggcaatgccgtaaacaacctgcgcaactccgtcattgacgaagttgtagtatgcgataccatcccactgagcgacgagatcaaggcactgccaaacgtgcgtaccctgaccctgtccgggatgctggccgaagcgattcgtcgtatcagcaacgaagaatccatctctgcaatgttcgaacactaatcgaacacggccgaaaaacccgctgcggcgggtttttttgtctctgggttttatttgtatgattaatgcctccttcacctgccattcacatgacagatgatgcgcatacggatgatagataattgtgaaaaacgtaacctcctcacatgttctgccctttcgcgccctcatcgacgcctgctggaaagagaagtacacctcgtcacgttttatccgtgacctgattgccgggatcaccgtcggcattatcgcgattccgctggcgatggcgctggcgattggcagcggcgttgcaccgcagtatggcctgtacacctcagccgtggccgggatcgtcatcgctctgaccggcggctcgcgcttcagcgtctccggcccgactgccgcctttgtggtgatcctctaccccgtttcacagcagtttggtctggcaggcctgctggtcgccaccctgatgtccggggtctttttaattctgtttggcctggcccgctttgggcggctgattgagtacatccccctttccgtgacgctggggttcacctcggggattgggatcaccatcggaaccatgcagatcaaggatttcctcggcctgcaaatggctcacgtccctgaacactatctgcaaaaagtgggcgcgctgtttatggcgctgccgactgcgaacctcggcgacgccgccatcgggatggtgacgctgggcacgctgatcgtctggcctcgtctgggcattcgactgccgggccatctgcccgcgctgctgctgggctgcgcggtgatggctatcgtgaatatgttcggcggccatgtcgccactatcggctcgcagttccactatgttctggcggacggttcgcaggggagcggcattccgcagctgctgccgcagctggtgctgccgtgggatatgcccggatccagctttaccttaagctgggattccctgcgcgccctgcttcccgccgcgttctcgatggcgatgctgggggcgattgaatccctgctctgcgccgtcgttctggacgggatgaccggcaccaagcacaaagccaacagcgagctggttggtcaggggttagggaacctcatcgcaccgttctttggcggtattaccgccacggcagccatcgcccgttctgcggccaacgtgcgcgcgggtgcaacgtcacccgtttcggcagttatccactccctgctggtgatcctcgccctgctgatcctcgccccactgctctcctggctaccgctttccgccatggccgccctgctgctgatggtggcctggaacatgagtgaggcgcacaaggtggtgaacctgctgcgtcgggcgccgaaagacgacatcatcgtgatgctgatctgcatgtcgctgaccgtgctgttcgatatggttatcgccatcagcgtcgggatcgtgctggcttccctgctgtttatgcgccgtattgcgcaaatgacgcgcctctccccggttaacgtggaggtgcctgacgatgtgctggttctgcgcgtgattggcccgctgttcttcgccgcggcggaaggtctgttcagcgatctggagtctcgcatcgcgggcaaacgggttgtggtgctaaaatgggatgccgtaccggtgctggatgcgggcggcctggacgccttccagcgctttgtgaaacgtctgcctgaaggctgtgagctgcgggtgagtaacctcgaattccagcccctgcgcaccatggcgcgtgcaggcgtgcagccgatccctggccgccttgctttttatcctaaccgtgaagccgcgttagcggatctgtgagccgcctgatgcagagaaacgtctctgcatcatcaccccgatcgcctgctggagccatgcaagcacggcaggcgtcatccaggttcccttcatcagatgcggctcctgctgcatggccgtacgaaacttttgctgggtctccgggttggtgcccgcgtacgactggaacagcgccagccagttttcggcaagcttttgggcatcgtcagaggcggggtcgagattttcccgctgcgcctgatgcagcttcgccaccagcggcggccactccatcatgcgatcaaagtagtgcttccgcgtaaaggccatctcttcgggagtaaggtacttctcccatatgctgagcttggattccgcaaacgcgcgcgtaatgtaatccgtcatctccggcgtgatgccggtctgcacctgcatctgtggctctacgctgtgcatctcgttcagccgggtaagaaactccggtttgcccgccgtgtcctgctccaggcgctccatccagcgcgtcgccaggtccttcgccctctcgtccgtaacgggtatatggtactccagcagcgcgttggcctctgccaccagccctgaccagatagccgacagcgcgtccttctgcaccgcaaacggcagctgctgtaactcttctttgctaaaccagcgatcgtacatattcattaactccagagtctgtagccaggattccaggtccggcgtcgcatcgtcgagaagcccggcacgcagttcgaccagccggtcgcgcagcgtatgtatgctacgcagctgtttatccagcaacgtgatttgcgcatcgagtaactcggttaacgacagcgactcctgttcaaggaaatccctgatttcagcaagttccagccccgcttttgccagcgcctggatcatatgcaggcgctgaacatccgccaggttgtaaagccggtaacctgccgcgcttctggcagaaggcagcaacactcctgtttgctcatagtgatgcaatgtgcgtacggtgataccggcccgtttcgccagctcacccacctgaatcaacataactgctccttttctttgccagtgccgccactctggtgccttacgttacgtgagggtcaacccttgatgcaaaaaaaaaacgactcccagggagtcgtttcggtattctttcgtcatggcactagctgtgcttatgctgatctcgacggcagcgtttatcgtagtggcgcacccaccagtatttatcgcagacttcctcatgtccgctcacgcgcgccccggcgagccacaataccgcaccgaggaagatgctcagtaccgcgccatgcgcgaagtattgcggaagatcaagctgcggcagctggtttaatatggaataacctacgccgacgaccatcacaaacagccccaaacccatcagcacgttaccgagtagcgaagcgtttttgcgtttcatgtgtcacctccggaactttgggttgtcaggggaaaagcccctaatccttgtgtgtaaagtatagacaacgctccttttatgagttgcgtgaatgatcacaattacagataacgcccacacaaaagtttacaaataacacgttgaacagcttgaaattctaattgttcaggtaagtaattattcgtatttcgctgcgacgatcgcagaattttgtcaagcggcgcgccagacagtaaactacgcgccagatctggaacccattaggaattgaatcgtgacgattaaactgattgtcggcctcgccaacccgggcgcagaatatgcggctacccgccacaatgccggggcatggtacgtcgatctgctggccgagcggttacgtgctcccctgcgtgaagaacctaaattcttcgggtatacctcacgtatcaaccttgctggcgcggatgttcgcctgctggtccccaccacgtttatgaacctgagcggtaaagccgtggcggcgatggcaacgttttatcgcatcaatccggatgaaattctggtcgcccacgatgagctggatcttccccctggcgtggcaaaattcaagctgggcggcgggcacggtggtcacaacggtcttaaagacatcatcagcaagctgggcaataacccgaatttccaccgtttgcgcgtgggaatcggccatccgggcgataaaaacaaagttgtcggtttcgtgctcggtaagccaccggtttctgagcagaaactgattgatgaggcggtagacgaagcggcgcgctgcacggaaatctggctgcaagacggcttaaccaaagcgacaaaccgcttacacgctttcaaagcgcaataatccgcccgatacggcttttttaccgcgcgtcatgcgggttacgtgtataataggcgtagttatttacttttcatcaatcggttatcgttaacggattgattatcaagatattaaggtgatttagaaatgggattcaaatgcggtatcgtcggtctgccaaacgtgggcaaatccaccctgtttaacgcgcttaccaaagcgggtatcgaagcggcgaacttcccgttctgtaccatcgaaccgaacaccggcgtggtgccaatgcctgatccgcgtctggaccagctcgcggaaatcgtgaagccgcagcgcattctgcccaccaccatggaattcgtggacatcgcgggcctggtgaaaggcgcatccaaaggcgaaggtctgggtaaccagttcctgaccaacattcgtgaaaccgaagcgatcggccacgtagtgcggtgcttcgagaacgacaacatcatccacgttaacaacaaagtggatccggctgacgacatcgacgtcatcaacaccgagctggcgctctctgacctcgacacctgcgaacgtgcaattcaccgcgtgcagaagaaagcaaaaggcggcgacaaggacgcgaaagcggaactggctgcgctggaaaaatgtctgccacagctggaaaacgctggcatgctgcgcgcgctgaaaaacctgactgacgaagacaaagcggcgatcaaatacctgagcttcctgaccctgaagccaaccatgtacatcgccaacgttaacgaagacggtttcgagaacaacccgtacctcgacaaagtgcgtgaaatcgctgcggcggaaggttctgtggttgttgccgtgtgtgctgccgttgaatccgacatcgccgagctggacgatgccgaccgtgaagagttcatggccgagctgggtctggaagagccgggcctgaaccgcgtaattcgtgcaggttatgagctgctgaacctgcagacctacttcaccgctggcgtgaaagaagtgcgtgcgtggacgattcctgtgggtgcgactgcgcctcaggcggccggtaagatccacaccgacttcgagaaaggctttattcgtgcgcagactatcgcgtttgaagacttcatcacctacaagggtgagcaaggcgcgaaagaagcaggcaagatgcgtgcggaagggaaagattacatcgttaaagatggcgatgtgatgaacttcctgtttaacgtctgatttgttttgaatgaaaaaaatccacgccttggcgtggattttttttaagttaacgaacttaagccctcttgcttagatagaactcaagatattttttaggtctatcctgaaatgctcgttctttgccgtaattataagcatcgttaaaatacttatacgcttcatcgaattgattcagctcgtaacaaactatctcccgcaatcaaaagacctttcatttgattgcactgctaggtcaccctattcaaacttacatttgactccatatattgaaagatcaaataaggtttatgtagatacgcgctaaaggcgagtaacttccctcgccgttatccatcaaaaagatattacccaacgattattaaacctagtaatataattttatatctggcaggttgactttcaccttgcgccaatacaacatgaatatttttattttccaaaaaacaagaataaatatacacatcaagattattatatttataagaaggctctggatcatcatgaaatgtcaaagcctttattccagaaatattacttacaatttcttttttcaatgagttatcgatatcccaaagaggtattgcgtttatattcctgaatgcaatctcgctatttaaatatggaatatatattttttctgaaaaatcataaaaaccattctctttcccatcatataaagtttttctaggtttgaagttataaaatttcagattcataaatttcatatctctcttattttattttcggccaaaagttggcttatagattttgatagttcatattgtgtccctcccccaggctgatcaaaccaagggatagcaggtcctgcgtccgcatgtaccggtgcaatcacttcatatgttttatatgaactcatagtttttaaaatcgataaagatcgtccaggagcgctttaaacaagggatgagcgagatcgagataaagcttgattaacgaacttttacgaacttcacagaccacttttgccccatccatgccccacgcataattctagtcagcgccagaccacatcagccctgtagggcaaatcgataacaaacaagccagcagtatgttccccaaaattaaaaaacaagtggttcatgccttgacagacaaaaccttcaaagcaaaaatactgtatattcaaacagtgtgcgccgggagaccggtagagatcaaggggtgaaagtccccgaccattgaaggccattacacttcagtgaacactgacggtaacgtcatcgacttcgtggtgttcgggatcctgcacggcctgtcgactaagtggtatctggtccctgtcgtggcggcaatctggtttgcggtgtactacgggatcttccgcttcgccatcacccgttttaacctgaaaacgccaggacgcgatattgatacggccaccagcgttgaacaggcggttgccggtaccgtgggcaaatccggctataacacccctgccattctggcggcgctgggcggtgcggataacatcacctcgctggataactgcattacccgcctgcgtttgtcggtggcggatatgtcaaaagtggataccaacgccctcaaggccaaccgggccatcggcgtggtacagttaaaccagcacaatttgcaggtggttatcggcccgcaggtacagtcagtgaaagatgagctggcgaccctgatgcgaacagtagaagcctgatgcctcagccccctcaccatgagggggttttacgttaaggattaaagcatgtttgatttctcaaccgtcgtggatcgacacggcacctggtgtacgcagtgggactatgtcgccgaccgctttggcgcggcggatctgctgcccttcaccatctcggatatggatttcgccaccgccccctgcataaccgacgcgctgcaacagcgcattcatcacggcgtgtttggctatagccgctggaaaaacgacgagtttctcgccgccgtcgcacactggttccagcagcgctttaacacccgaattgataccgaaagcgtggtttatggcccctccgtcatctacatggtctcggaactgattcgcctctggtcaaaacccggcgacggcgtggtggttcacaccccggcatacgatgccttttacaaagccttaaagggtaacgggcgtcgtgttgtggcggttgaaatggaaaaacaggccgctggctggcagggcaatatggcagctctcgaagcggtgctggcgaaaccggaaaacaaaattttgctgctgtgcagcccgcagaatccgaccggcaaggtctggacgcgggatgaattgacgcagatggcggaactctgcgagcgctatgacgtggcggttatcagcgatgaaatccatatggacatggtgtggggagaacatcgtcacacgccgtggaccgcagtggcgcggagcaaatgggcgcttctgacctccggttcgaaaagctttaacattccggcgctgacgggggcttatggcctgatcggcgatgaagagagccgtaacggctatctcagcgcgttaaaaggtcgggcgggctctcttccccttccgtgctggcgctaacggcgcatatcgccgcctatcagcaaggggggccgtggctggatgccctgcggggttatctggaagagaatctgttgtatatcgctcaggaagtaaaccgcgcttttccgaaactcaactggcagccgccggaagcgacctatctggcctggatcgatctgcgtccgctgaacattgacgatcgggcgctgcaaaaagtgttgatcgagcagcaaaaggtcgccatcatgccgggatatacctatggaaaagagggaaatggcttcgtacgcctgaatgcgggctgcccgcgcagcaagctggagcaaggggttcaacgcctgattgccggcattaatacgcttctgtaatcaatttgcgcaacggaatattcccttgcgcaaatagctttttaccccgttttgtttttataatatggcgcactttaaccagaaaagagtgcgaccatgattgatacacgcctgcctttaactgatattcatcgtcaccttgacggtaacattcgtgcccaaaccatcctcgatcttggccgccagtttaatttaacgcttcctgctcagacccttgagtccctgatccctcacgtacaggtgacctctaatgaaccggacctggtcagcttcctgagcaaactcgactggggcgtgaaaatgctggcgtcgctggatgcctgccgccgcgtggcgtttgagaacatcgaagatgccgcccgcaacggcctgcactacgtcgagctgcgcttctcgccgggctacatggcgatgacccacaacctgcccgttgcaggcgtcgtggaagccgtcattgaaggcgtccgcgaagggtgtaaaatcttcgacgttcaggctcgcctgatcggcatcatgagccgtaccttcggtgaagccgcctgcctgcaggagctggaagcgctgctggcccaccgtgatgccatcaccgccgtcgatctcgccggtgacgagctgggcttcccgggcagcctgttcctctcccacttcaaccgcgcgcgcgatgccggctggcacattaccgtgcacgcgggtgaagcggctggcccggaaagcatctggcaggccatccgcgagctgggcgccgaacgtatcggtcacggcgtgaaggcggtagaagagcgcgccctgatggatttcctggcggagcagcgtatcgggattgagtcgtgcctgacgtctaacattcagaccagcactgtagcatcgctgtcgcagcacccgctgaaaaccttcctcgagcacggcgtgctggcctcgctgaacacggacgatccggcggttcagggcgtggatatcattcacgagtacaacatcgccgcaccgcaggcgggtctgagccgcgagcagatccgtcaggcgcagatcaacgggctggagatcgccttcctgacgcctgcagagaagcaggcgctgaaagataaagtggctcgcggttaacaccgttgccgggtggcgctgacgcttacccggcctacaaaatattaaaaaacttatgccagacagagcgtcgcgcgatgtttggcagattcgatccccagctcaatcagctccataatctgtattgcctggctggccggaaccggattctctcccgtaccgttcagcgcatcgcggatagcggcataatacgccggatagttacccggtatcgtcagcaaggtctcttcgaccagctcgtcgccttccacccgcgtgacgacgccgtcgcgcatatcatagccccagtcttcctgcggcagacgctcaccgtttttcagcctgtcttcctgcggatcgagaccaaacttcacgtagctgccgcgcgtgccgtgaataatgtaacgggcagattctgccgccgcgaccatcgtgccgtgcagcacaattcgccgctgcgggtaactgagcaccgcgtggaagtaatcggtcgtctgcgcaccgggcctgagctgggccagatcgaccgtcatgctcaccggcaggccaaagagattgacggcctgatccagcagatgcggggctaaatcataccagataccgctgccaggaccggcctgctcgcgccagcggtttcgtacctgcgggcgaaagcggtcaaagtgcgactcaaaaaagaggatctcccctaacgtaccttcactgagaagccgttttaccgtcagaaaatcactgtcccagcggcggttatggaacaccgacagcagcctgcccagactctttgccagcgcatccagctcgcgagcctgtgacagtgtcacggtaaagggcttatcgacaaccacatgcttcccggcttccagcgcggcctttgccagcggaaagtgggtatcgttcggcgtgggaatgacgattaaatcaatgtttggatcgttgaaaagatgttttggctcggagacaaccggcacagaaggccagtctgcatggactttagcagcgtcgctgctggataccgccgccagcgtcatccccggcgtcccggctatcagaggcgcatgaaacgttttgctcgcgtacccgtaaccaataagcccaacgcggatattatcactcatagtgtcatcctcttttaagtcgttcttatttcacactggctagtctggcattaccacggattaataatgtgccgtatgacgtaaaatagcaggttatacggattgtttttgttacatagtattaacctactgattttgtttaagggaaccgttcccaaagcccttgccgtcagagaaacgtcgctgtaacatttgcgccctgtctttatggataaagtacaattacacatcatgacgtcaattattaatcgaatcattgaattagcgggatggattgtccttggggtgtcggtcattttgctgggcgttgccagccatatcgataactaccagccgccggagcctgtcaccgtcgctcaacctaagtaaccggttactgcaataaagagtgacataatatgtcagttacttattgccagccctggtgaacacggttaaccttctcttccaggcatcgtctgatgcctgaatttcagcaaagaaaactcctaatttcgtcgcgttacctgagtgggctgtttacgtctttattaatccgtttattattcgaacgaattaccttaactggtattactcacttttatatggaaacttattaatatgacagttcaggactatttattaaaatttcgcaagatcaattcgcttgagagcctggaaaaactgtttgaccatctgaactacaccctgtcggataatcaggaaatcattaatatgtatcgcgccgctgaccatcgccgtgcggagctggtctccggtggccgtttgttcaacgtcggcgaagtgccaaagtccgtatggcgttacgttttataagaaagtagccatccgcgcgaaatgttatatactctccgccctgccaactggctgtacaacatttcgcgcagattatgggagagttcatgaccgcaacgcctggagaacgcattggaggctggttaatcgccccactggcatggctgctggttgccttattaagcgcatcacttgcgctgctgctttataccaccgcactgattacccctcacgccattcagaccctgttgtcgcaaagcgtgcttaatattgctttgtggtttgtgtcgttcgttttcgcgatcgggatgtggtactacacgctgtggctgaccatcgccttctttaagcgccgtaagaatgtgcctaagcactacattatctggctgctggtttcggtcctgctggcggtgaaggcgtttgctttttcgcccgtttcagacgcgctggccgttcgtcagctgcttttcccgttgctggccgcggcgctgctggtgccctacttcaagcgttcgacgcgggtgaaaaacaccttcgtgaacccgtaataaccctacagataacctgttgtcgcctgcctgggtttgtccgataataggcggcttttttatttcaggctaaataatgaccgattacttactgctctttgtcggcaccgtgctggttaacaacttcgttctggtgaagttccttggcctgtgcccgtttatgggcgtttccaaaaagctggaaacggcaatgggtatggggctggcgacgaccttcgtcatgacgctggcgtccatctgcgcgtggtggattgatacctggatcctcatcccgctggggttaacctatctccgtacgctggcctttattctggttatcgcggtggtggtgcagtttaccgaaatggtggtgcgcaaaaccagcccggcgctctatcgcctgctgggcatcttcctgccgctgatcaccactaactgcgccgttctcggcgtggcgctgctgaacatcaacctgggtcataactttatgcaatcggcgctgtatggtttttctgcggccgtcggtttctctttggtcatggtgctttttgcctctattcgcgagcgcctggcagcagcggatattcctgcgcccttccgcggtaacgcgattgcgctggtcaccgccggtttaatgtctctggcctttatgggctttagtggtctggtgaagttgtaatgaatgctatctggattgccatcgcctctatcagcgtcctggggttggtgtttggccttatcctgggttacgcctcccgccgtttcgcggtagaggacgatcccgttgttgagaaaattgatgagcttctgccgcaaagccagtgcgggcagtgtggctacccgggctgccgcccttacgctgaagcggtaggcatccagggcgaaaaaattaaccgctgcgcccccggcggcgaagcagtcatgctgaaaattgccgccctgcttaacgttgatccgcagccggttgatggcgacgcggacgtgcaggagccggtccgcgcgctggccgtgatcgacgaagcgaactgcatcggctgtaccaaatgtattcaggcctgcccggtcgacgccattgttggcgccacgcgcgccatgcacaccgtggtggcggacctgtgcaccggctgtaacctctgcgtagccccctgcccgacgcaatgtatcgagctgcgcccggttgaaacgactaccgaaagctggaaatgggatcttcaaaccattccggttcgcaatattcctgtggaacaacatgcttaagttattttctgctttcagaaaagagaagatttgggactttgacggcggtattcacccaccggagatgaaaacccagtctaacggcacgccgctgcgtcaaataccgctggcgacccgtttcgtcatgccgctcaagcagcacattggcgctgagggtgagctgtgcgtgaaagaaggcgatacggttcttcgcggtcagccgctaacctttggtcgcggacgtatgctaccggtgcacgcccccacctccggtaaggtggtcgctatcgcgcctcatacggtggcgcatccgtcagcgctcgcagagctgagcgtgataattgaagccgacggcgaagaccgctggatcgaccgcgatggctggagtgactaccgctcccgcagccgcgaggcgcttatcgaacgcattcatcagtttggcgttgctggcctgggtggcgcaggcttcccgaccggcgtcaagctgcgcggcggtggcgataacattcagacgctaattatcaacgccgccgaatgcgaaccgtacatcaccgccgacgatcgtctgatgcaggactgcgccgcccaggtggtggaaggcatccgcatcctcgcgcacattctgcagccgcgggaagtgctgatcggtatcgaagacaataaaccgcaggctatctcaatgctgcgcgccgtgctggcgggcagtcacgatattagcctgcgcgttatcccgaccaaatacccctctggcggtgctaaacagctgacgcaaattctcaccggcaagcaggttccgcacggcggacgctcttcagatatcggcgtgctgatgcagaacgtcgggaccgcgtacgccgtgaagcgcgcggtgatcgacggcgagccgctgaccgaacgcgtggtaacgctgaccggggaagcggtctctcgtccgggcaacgtctgggcgcgtctgggtacgccggtgcgtcacctgctggagcaggctgagttttgcccggctagcgaccagatggtgatcatgggcggtccactgatgggctttaccctgccgtggctcgatgtgccggtagtgaaaatcaccaactgcctgctcgccccttccccgaccgagatgggtgaagagcaggaagaaaaaggctgtattcgctgcagcgcctgtgccgacgcctgcccggcggatctgcttccgcagcagctgtactggtacagcaaaggccagctgcacgacaaggcgacagcccataacctggctgactgcatcgaatgcggtgcctgcgcctgggtctgccctagcaacattcctctggtgcagtatttccgccaggagaaggcggaaatttatgccatctccatggaagaaaaacgcgcggcggaagccaaggcacgctttgaagcgcgccaggcgcgactggagcgtgaaaaaatcgcccgtcaggagcgccataagcaggccgccgttcagcccggagagaaagatcaggatgcgattaacgccgcactggcccgcgttcgcgagaaaaaagcgaccgcggcgcagcctgtggtgatcccggctggcgagaagccggacaacagcgaagcgattgcggcgcgtgaagcgcgtaaagctcaggctcgcgcccgtcaggctgaaaaagcgcatacggtccaggcagaggcggagatcgacccgcgtaaagccgccgttgaggcggcgatagcccgcgctaaagcccgcaaagccggtgagaaaagcgtggtcgtcgagcaggatgcggtcgaccctcgcaaagcggccgtagaggcagcgattgcccgtgctaaagcccgcaaagcggcgcagcagacgccaaccgcagaacccgacgcgccggtcgatccgcgtaaagccgccgttgaagcggcgattgcccgcgctaaagcccgcaaagcggcgcagcaggatgagcagccgcaggccgccaacgatgacccgcgcaaagccgccgtcgccgccgccattgcgcgcgttcaggcaaagaaagccgcacagcaagcagttaacgaggattaaatggttttcagaatcgcaagctccccttacacccacaatcagcgccagacatcgcgcatcatgatgctggtctgcctggcggcgctgccgggcattgccgttcagtgctggtttttcggctggggaaccctgttccagataatcctgggctgtgccagcgccttagcggcggaagcccttgtccttaagctgcgcaaggcggcggtctcccgcattctggccgataactccgcgctgctgaccgggctgctgctggcgatcagtatcccgccgtttgctccatggtggatggtggtcctcggcaccgtgtttgccgttatcattgccaaacagctgtatggcggactcggccataacccgtttaacccggcgatgatcggctacgtggtgctgctgatctccttcccggtacagatgaccagctggctgccaccgcacgagattgcggccacggttccggacttcatggatgctctgcacgtgatctttaccggccatacggcacttggtgccgatatgaacgcgctgcgcatgggcgtggacgggatcagccaggcgacgccgcttgatacctttaaaacgtccctgcatgccggacacagcgttgagcagatcatgaaatccgccatctacagcggcgtactggcgggtgccggctggcagtgggtcaacctggcgtatctgctgggcggcctgttcctgctgcagcagaaagccatccgctggcatattccggtcagcttcctcgtgacgctggcggtctgcgccacgctgggctgggtattctctcctgaatcactggccagcccgcagctgcacctgctctccggggcaaccatgctgggtgccttctttatcctgacggatccggtgacggcctcaacgactaaccgcgggcgcctgatcttcggcgcgctggcaggcctgctggtctggctcatccgcagctttggcgggtacccggacggcgtggcttttgccgtcctgcttgccaacattaccgttccgctcatcgactattacacgcgtccgcgcgtgtacggtcatcgctaagggtctcgccatgttcaaaacgatgcaaaaacacggcgtcacgctggctgtcttcgccgcggtcctgacagggctgacggcgatggtaaatgcgctgaccaaaacgaccatcgaagagcaggcctcgaagcagcaaaaggcgctgttcgatcaggtgatcccggcggaattctacgataacgacctgcaaaaaagctgctttgtggtagacgcgccgcagcttgggaaaggcccgcaccgcctcttcattgcccgcaaaggggataaaccggtcggcgcagtgatggaagcgacggcgcctgacggctattccggtgccattcagctgcttgtgggcagcgatttctccggcaccatactgggcacccgcgtgacggaacaccatgaaacgccgggtcttggcgataaaattgaaacccgtctgagcgactggattttgcactttgccggtaaagtgatccatggtgaagatgacaccgcgtttgcggtgaagaaagatggcggcgagtttgaccagttcaccggggcgaccatcaccccacgtgcggtggtgaatgccgtaaaacgagccgggctgtacgctgaaacgctgcccgcgcaaatcaacaatcttccggcctgtgaggagtaatcatgagccaggtaaaagaggttattgtccaggggttgtggaagaacaactccgcgctggtacagcttctggggatgtgcccactgctggcggtgacatccaccgccaccaacgcgctcggtctgggtctggcaaccacgctcgtattgaccctgaccaacctctccatctctgccctgcgccgctggacgccgtcggaaattcgtattccgatttacgtcatgatcattgcgtcggtggtcagtattgttcagatgctgattaacgcctacgcgttcggtctgtaccagtcgctcgggatcttcattccccttatcgtcaccaactgtatcgtggtcgggcgtgcggaagcctttgcggtgaaaaacagtccggccatgtcggcgctggacggtttttctattggcatgggtgccacctgcgccatgttcgtgctgggctcgctgcgcgagatcctcggcaacggtacgctgtttgacggcgctgatgcgctgctgggcggctgggccaaagcgctgcgtattgaagtgttccacaccgatacgccattcctgctggcgatgctgccgcctggcgcgtttattggtcttggcatgatgctggcgataaaatacctgattgacgagaaacgtaagcgccgcgcggctgagcgcagcgttctggaagggacacccgagaaggcctcatgaataaagaaaagcgcattgcgatcctgacccgtctgcgggacgagaacccgcacccgacgacggagctgaattttacctccccgtttgagctgctgatcgccgtgttgctctctgcgcaggctaccgacgtgagcgtcaataaagccaccgccctgctctatccggtcgccaatacgccgaaggccatgctggagctgggcgtggaaggcgtgaagtcctatatcaaaaccatcggcctgtttaacagcaaagccgagaacgtcatcaagacctgccgaattttgctggagcagcacggaggcgaagtgccggaagaccgcgctgcgctggaagccttgccgggcgtgggtcgtaaaaccgcgaacgtagtactcaataccgcgtttggctggcctactatcgccgtcgatacgcatatctttcgcgtgtctaaccggaccaacttcgcgccggggaaaaatgtcgagcaggtcgaagagaagctgctgaaagtggttccggcggaatttaaggttgattgccatcactggctgattctgcatggccgttacacatgtattgcccgtaagcctcgctgcggctcctgcattattgaagatctctgcgaatacaaagaaaaagtgtacccctgaggcatctcaatcccctgactaaagaagggctttcaaacgctcttcttttgaccgttatttgttagcctttcgtttcgcctcacctgtcacttattcggctctttaacgctgaaacaggttaatagttttttcatagccgaaaatttctatacatctgtgatcgcgatcaccctgataacttcatgttgtatttttgttgtcaaaatcgacctaaaccctttatctgacaagacactcctctttctttgccgacgataagaccagctatttttcagaatatgggctatatcactgccacaagcggcaaatagcagaacatatcgccaacagcccgtactgaccggtgattaccagtcgaaaaaactacctttactcagcgtatgaaatttaacgctgaataacatttgcatgaaccgacgattataccactcaggatatatgtaacagattattacaaacgtattgccagatggggcaggatagtgaacattacccgccgtttctcctcccaatataactataaggcgtatggactacggccatcacgctatgaacacccccgttaatatgggatgtaaaaaaagaggtatatgtgtcgactgcaaacaataaaccaacagatgaaagcgtgagtctgaacgcttttaaacaacctaaagcgttctatctcatcttctctatcgagttatgggagcgttttggttactacggcctgcaagggatcatggcggtttacctggtgaaacagctgggtatgtccgaagccgattccatcacgctgttctcctccttcagtgccctggtctatggtctggttgctatcggcggctggctgggtgataaagttctgggtactaagcgcgtcattatgctgggcgccattgttctggcgattggctatggactggtagcatggtcagggcatgatgccgctgtcgtgtatatgggcatggccacgatcgccgtgggtaacggtctgttcaaagcgaacccgtcttccctgctctctacctgctacagcaaagatgacccgcgtctggacggtgcatttaccatgtactacatgtccatcaacatcggttcgttcttctcgatgctggcaaccccatggctcgcagcgaaattcggctggagcgtggcgtttgcactgagcttcgtcggtatgctgatcaccgtggtgaacttcctgttctgccgcagctgggttaaaaactacggttcaaaaccagacttcgagcctgtgcatatgggcaaactgctggcgaccatcgtaggcgttgtggtcctggcggccatcgctacctggctgctgcacaaccagggtatcgcacgtgccgttctgggcgttgtggcgctgggtatcgtggttatcttcgcgaaagaagcattcgctatgcagggtgctgcccgtcgtaagatgattgtggccttcattctgatgctggaagcgattatcttcttcgtgctgtacagccagatgccaacctctctgaacttcttcgccattcgtaacgttgagcactctattctgggcatcgcgttcgaaccggagcagtatcaggcactgaacccgttctggatcatgattggtagcccgattctggccgcgatctataacaagatgggcgaccgtctgccaatgccgcacaagtttgctatcggtatggtgctgtgttccggcgcgttcctggtgctgccgctgggtaccaaatttgctaccgacgccggtatcgtatccgttaactggctgatcctgagctacgcgctgcagtctatcggcgaactgatgatctctggtctgggtctggcaatggttgcacagctggttccgcagcgtctgatgggcttcattatgggtagctggttcctgaccactgccggtgcagcaattatcgccggtaagattgcgaacctgatggccgtgccggaaaacgtcactgacccactggtttccctgaacgtctacggtaccgtgttcatgcagattggtatcgcgactgccgttattgccgctctgatgctgctgaccgcaccgaaactgaatcgcatgactcaggacgacgacaagaccgctaaggcgaccaaaaccgctactgcgtgaaatccgtgagaaacgactgaccagaagccgctaattgattagcggctttttttttatccgtttgcgcactaacatagctgaaacctcagcgaaaaggagttaccgatgaaactgttctacaaaccgggcgcgtgctctcttgcttcccatatcaccctgcgcgagagcggcaaagatttcacgctggatggcgttgatctgatgaaaaaacgtctggaaaacggcgatgactttcttgccattaacccgaaaggacaggttccggcgctcctgctggatgacggtaccctgctgaccgaaggcgtggcgattatgcagttcctggccgatagcgtgcccgatcgccagctgctggccccggtcagtaccatttctcgctataaaacgctggaatggctgaactacattgccaccgagctgcacaaaggctttacgccgctgttccgcccggatacgccggaagagtttaagccgaccctgcgcgccctgctggagaaaaagctgcagtacgttaacgaatcgctgaaagacgaacagtggattggcggctcgcgcttcacgatcgctgatgcgtacctgttcaccgtgctgcgctgggcacgtgcggttaagctgaatctggaagggttagaccacattgcatcgtatatgaaacgcgtggctgaacgtcctgcggtggctgcagcgctgaaagcggaagggttgaattaaccgagcagactgtgttgccgggtggcgctgacgcttacccggcctacgaattccgtagacccgtgcaagcgtcagccccacctggcatcgtttaaagctgggttgcgctgaaatagtgctccggcttcgcgatacgatcctgtgccgcgaccacctgcagttcatattcctgcatctctttcgtcgcaatcataatttcgtacaccgctgccgtaacgtgctccagggcatccctcaccgttgcaccctgaagcagtttcaccagcagcagcccgctggtcacatcgcccacgcccaccggctgacgcgggccaaaatccaccagcggacggctgatatgccaggcatcctctttcgtcaccagcagcatctcaaagcgatcctggcttagccctgcgcgcgcgaggtgttttaccagcacaacctcaggcccctgcgcgatcagctcgcgtgacgcgcttacggcctcttctacgctgttaaccggatgctcgcagagaatttccagttcgaccaggtttggcgcaatgatatcgctggcgggcagcgcatggcgaacgtggaattctgccacgcctggcgccacgatacagcctttctccggatggcccataacggggtcgcagaagtattttgccgacgggttgacagcctttacctgacgcacgatgccgaggatatgttccccctgctccgctgaaccaagataaccgctcaatacggcgtcacagcgcttgagctggccgatatcggcaatgccctgcaccacctcggtgaggtgcgaaggcggcatcacgcagccggcccatttgccatactgcgtgtggttagagaactgaacggtattgaggggccagacgttgacgccgaggcggcgcatcgggaattccgcagcgctgttgccagcatgtccaaaaacaacgtgggactgaatggcgaggatgttcttcattttgtgcttaccaaaccctgaaaaaacaaaaggggcgtggtttcccacgcccctagagactgttaattatttccagcagacaaggcagtagtttttcttaccgcgacgcagcagggtgtagcggccatacagacggtcgccatcaacaaaggtgtattccgggtcagcctgcttttcaccgttgatggtgatcgcgtttgaggcgatggttttacgcgcctgaccgcgggaaggctgcagctcagaatccaccagcgcctgcatcaggtcagcccctttctccatctcaaccattggcacgccgtcctgcgccagctgttcgaagtccgcttcgctcagatcgctcagggtaccgttgaacaggcttgcagtaatgcgttttgccgcggccagaccttcttcaccgtgaaccagtttggtcacttcatctgccagcacgtactgcgcgcgtggcgctttaccgctgttcttgtcttcttcttccagcgcattgatgtcttcaatatccataaaggtgaagaacttcaggaagcgataaacatcggcatccgccgtgttgatccagaactggtagaatttgtacgggctggttttcttcggatcgagccataccgcgccgccttcggttttaccaaatttggtaccgtcagctttggtaatcagcggaacggtcagaccaaagacctgattctggtgcaggcgacgggtcaggtcgataccggaggtgatattaccccactggtcagaaccgccaatctgcagggaaacaccgtgcagcttgttcaggcaggcaaagtcatacccctgcagcaggttgtaggagaactcggtaaaggagataccctggtcgtcacggttcagacgctgcttcacggcctctttgttaatcatctggttaacagagaagtgcttgccgatgtcgcgcaggaaggtcagcacgttcatgctgccaaaccagtcgtagttgttcgcggcaatcgcggcgttatcgccacagttgaagtcgaggaacggtgcaacctgtttgcggatcttatcgacccactcctgcacggtatcttcggtgttcagtttacgctcggcggctttgaagcttgggtcaccaatcagaccggtcgcgccgcccaccagggcaacaggcttatggcccgccatctggaagcgtttcaggcataacaatggaacaagatgccccaaatgcaagctgtcagcggtgggatcgaagccgcaatagagcgcgatcgggccttgcgccagtcgctctgctaacgcttcctcgtccgtcacctgggccacgaggccccgctcttgcaattgtttaatcaagttactgcttgccatcaaattctccatgtataaacgactgcacctttgccggtacacgacttttcgcctgatgcgaaaggaccatagaataaagcgcaagcgcggtgtgcgctagcgcttaaatcaacaaatttcggggattacggcgccagtctgtcgattttccagccgccattctcgcgctggtataaaaagcggtcgtgcaggcgatgttcgccaccctgccagaactcgatttgctcaatcgggatgcggaaaccaccccagaagctcggcagcgggatttcaccctgctggaacttctgcttcagctccaggaatttactttccagcaccccgcgggcggaaatgcggctggactgttttgatacccaggcaccaatctggctgtcacgcgggcggctgtggaaatacttcaccacttccagcgtcgagagacgttccgctttgccggtcaccatgacctgacgttccagcatgtgccaggggaacagcaggctgatacgcggattgttttccagatggtgcgctttgcggctgccaaggttggtgtagaacaccagtcctttctcgtcataatgcttgagcaatacgatgcgctgataaggttgaccgttttcatccaccgtcgcgacgaccattgccgtggggtcggcaagtttcgcttcgcaggcctgtttcagccagcgttcaaaaagcacgaggggttcagcgggaagatcctggcgacgcaggcctcctttggtgtattcacggcgcagatgcgcaatttgctgcagttcgtcgttatctgacatggcgttagctgacattgagagtgggtggcgctattgtgcgccgcccctgtaaaaatctcaacgcttcggattttcgagctggcaattgttcagcacaatacggtcgcgtttgtagaccgtggcgctgtcgcctttcgaccagaagacatagataccgtcggtgtagcgtgcgcccgaggccgaaatgccctgcttcagcgtcagcaatttattgtcgtaaacaaaactggcttcctggcgcggattgttcagcttcacggtcagcggtttttcgtcgcagcgatactccagggtatcggtctgcatgcgctcaacgagctggttgtagacgctgcatcctgacagcagcaaaggggcggcaataagaagaagttttttcatgggcgtattccgaagactttcctggtcctggagggcatgactgcccccctgtttcgttccattttaacgacgacgcgccgcgctgaatttcagttaactctgattatgacgcggatttgccgggaaaatcgccccaaggacgctcgcctcgcgcgcgccggttaccgacggtaaattgcccggcagcccggcaatggtgcgccaggcaagccaggcaaaggccagcgcctccatatcatcaccgctgatgccggcctcatcggtcgtcgacacttcggtacccggcagcagcccggcaagacgcgccatcaccagcggattacggcttcccccgccgcacaccagcaggcgttcacatccgccgctaagcagcacctgttcagaaatcgacacggccgtaagctcggcaagcgtcgcctgaacatcctgcggcgcgagcgccgggaatgacgccagctggcgctcaagccagccaaagttgaagtattcacgccccgtgcttttcggtgccggtaaggcaaaataaggatcgctcagcatggactgcagcagcgggagaatcaccttaccctcactcgcccactccgcgtttttatcatacggttgaccgcactgacgccagatccaggcatccattaacatattgcccgggccggtatcgtagccccggaccggctgccccggaataagcatcgacagattggcgatcccaccaatgttgagcaccatgcgccgttctgaagggtgcgccagtagtgcctgatgaaacgcgggcaccagcggtgcgccctgtccgccaagggctatatcgcgacgacggaaatcgccgaccaccgtgacgcccgttttcgccacaatctggttgttatcgccgatttgcagggtgtgcggggcatcgccgatgggttcatgccagacggtttgtccgtgacacccgatggccaccacatcctgcggacgaagatgttctttttgcatcaaagcctgcaccgcatccgcaaacagcgcccccaggcggacatccagctgtccaagctgcgaaagggtcagctgctgcccctgacagatactgagaatatcctctttcagtgaaatggggattggccaggtcaggctcgcctgctgtgccaccatgttctcatcaatggcagccagaacgacatctaccccatccagactggtgcctgacatcacaccaatgtagcgacccgatttcatgcgctttccttacgttgcgtgggctaaggatatccactcaaccataaacggcgtcgctttgccatccggcaataatattttttaacaatgtcagacgggtagcgtgggcggatcctgtttatgtctcgttaagtcaaattcaagtacaattttcctattgttagtgcaaagatatgaacgatggccccttatgccatataatttagccataacggatgccccccatcgggcgtttttggtgaacaggagattcaaatgattttacgtgtactgggcgtttcgctgattggtttaactctggctggctgtgtgaatgacagttcactttctggcgacgtgtatagcgcttctgaagcgaaacaggttcagaacgtgacttacggtaccgttgttaacgcacgccctgtacagattcagggtggtgatgaaaacaacgtgatgggcgccatcggcggtgccgttctgggtggtttcctgggtaataccgtcggcggcggtacgggccgttctctggcaacagccgcaggcgcagtggccggtggtgtagcaggccagggtgttcagggagcgatgaacaaaacccagggcgtcgagctggaaattcgtaaagacgacggcagcaccattatggttgttcagaaacaaggcagcacccgcttctccgcaggtcagcgcgttgtgctggcaagcaacggaagccaggtgaccgtttctccacgttaattaaaaatggatgtggccattgggccacatccatttacaatatacatcacttatacgaatatttttacaaaatatattcaccccacaaatatttaatctcatcgtatattgtctccgcgcaaagtatttattgcattacttgcttagactcttcgcaattacctcttcataatttatttctcattttgtaaaaacttatatgcttgcgaatagtcgttgtctaaaaggtcgttatatctcgttctgtttcggttgccttgtcgtcatcggaatattacaagctctcttttcaaaagtggttgaatgggttccctccttctcgcctcttttgttccctacgctcaccatttttttactcgtgtttcacctgtttattgcctgctttatggcaatgaaatactggtgtgataagcggcggctctatctgattgcgatcgcctttgcctttgccggttcggcattgttgatggtcggaacgctgtccagctttccagcatggctgaacctctatcagttcaacgtcgtaaactacaacgatgcgatgatctactttatgttccgccactttttaatggcggtgttgttcatcgttgcggcagtactctatcctacgcgcgattaccccttttcacggttggcgcatatctcaattgtgagcggggcgtttctctttaccgcctgtgttgtgggactggcctggatatattccagtcactcgcccttgttatccattgacctggttgataacgaaacccgtcagtttatggtgctctggagccaatgcataaatatttctttaattgtcttctgggtggtttcattagtaacgctgatgtttgtcacgcgcgtgcgcaatttattctgggtaggcggaaatttcctgtgcgtttgctatatcgtcacgctcgctatgctgttagtaggcggacatgctgaagatatatcgtggtatcgcgcccggctatttgaaaccgtcgctacgctgatgattatttttgtactgctctacgacgtcttcatgctgtaccgtgattcccatttaaaatatcagcagtcatatcaaaattcgattcgcgatccgcttacgcgcctgtataaccgcagctatttttatgaatcgttaaaccaggcgctggacatggcgaaacccagccgcccagtttcggttatcgtcagcgatctcgaccgcttcaagcgtatcaacgataactatggccacctacagggagacaaagtcttacagtttgtcgccaatctgctgatggattccgtacgcccgcaggacatcgcggctcgaatcggcggtgaggagtttgtgctgatgctggccaacacctcttcagatgcagcccaccaggtggcggaacgcattcggttgaagctaagcagctttgataaaaccagcagcggagggcagctacctgagccgattaccatcagcatgggagtatttacggcgacgtcatcgtccgtgaccgcagaagcgtgcgtggagagtgccgacaaggcgatgtatgaggcgaaggagacaggccgtaatcgagtggtggtctttaagtaaaaaaaggccttgctgctgcaaggccttagtgttgatcagtcgcgagactgtagctcatggatgttttgctcaaggcgagcaatcaggctaatgagcatttccagctccgccggtgaaacgcctgaaaggatttcaccgcgcgttttggtaatcacagcttccatttcagtaatgataggcgccgctttctcagtgagttttatccgcttggcgcgacgatcgctggcgcaggtttgtcgggagatcagccccttctcttccagctggtcaagcgtgcgcaccagtgacggttgctcaatgcctatcgcttttgccagttgaatttgcgactggtcgggcggcagctgatgaatgttgtgcagcgtgacccaatgcgtctgcgtcaattccagaggtttcaggcgatggtcaatcagagcacgccagacgcgtaccaaccttgccagatcagaacctaatggcgattccaatttcatctccttataattagcttgctaagttattatactgattttagaatagtgtgcagcatttgtaatggcaaaacaaatgcaatactgcattcatctaactcaaaagtatgacttacactgaattgtgatgcttcttcatactcagacaagccaacacggcattctgttcactgcaaaggatctctgctcgtgaccttttttcatcgctcagagggtttacccctccaggacctgatcttcggtgcgtcagtctactttccccctctgtttaaggccgtgctggtgggctttattctctggctcatcgcgcatcgcctgcttcgcgactggatgtattccggcgaaatctggcatcccatgctgatggatctttccctgtttgccctctgtgtatgcctgggccttgctgttctgatcgtgtggtgactatgcccctgaaaacgctgaagtacttttccaccctgtttgttctggtccttgcgctggtcgccggatggtggctctggaattattacatgcagtcaccctggacgcgtgacggcaagattcgcgctgagcaggtcagcattaccccgcaggtatcgggaagcattacgtcgctgctggttaaggataaccagtacgttaaaaagggagaggttttatttcgaatcgacgacaccccgtaccatatcgcgattctgaatgcccaggcgcagctggcaaaagcccagtctgatctggcaaaggccaacaacgaggccaaccgccgccgtcacctgtcgcaaaactacatctccgcggaagatttagacaccgccaacctcaacgttaaggcgatgcaggcgagcgtcaacgtggctgaggcgacgctgaagcaggcgcagtgggagctgacccaaaccgtgattaccgcccctgtcgatggatgggtgaccaacctttccgcccgcgtgggtaactatgccaccacgggacagcccgttttcgccctggtcgacagccactccttctacgtagtgggctacttcgaagagaccaagcttcggcatattcgcgagggatcgccagcagcgattacgctgtacagcggttcgcaaaggttacagggtcacgtctccagcattggtcgcgccatttacgatcaaagcgttgaaacagattccggcctggtgccggatatcaagccgaacgtcccctgggtgcgtctcgctcaacgcgtgcctgttcgcgtggagtttgaccatttaccgcagggcatcacgctggtatccggcaccacctgcactgtctccatcggaaccccttaatgaagctgcaggcgctctcctggcaaaactcgccgtggatgaaagcgacgcgttctcagtggcgctacgcgctgcgtaacggcattgccatgtgtctggcgctgaccgtcgcctattacctgaacctggatgagccgtactgggcgatgacctctgccgcagtggtgagttttcccaccgttggtggggtgatcagtaaaagccttgggcgtatcgccggcagcctgctgggtgccacggcggcgttaattatcgccggccacactctgaacgacccatggctgttcctgctgagcatggcggcatggctgggatgctgtacctgggcctgcgcccatttcaccaacaacgtcgcctacgctttccagctggcgggctataccgccgccattattgccttcccggtggtgaatgtgctcgataccaccgagctgtgggatattgcacaggcgcgcgtctgcgaagtgattgtcgggatcctctgcggcggatttatgatgatgatcctccccagcacctccgacggcaccgcgcttatcaccgccctcaagaccatgcacacccggctgcttgagcacgcgagcctgctctggcaaccggataccagcgatgagatccgcctcgcgcatgaaaaggtgataggacagatcctgacgatgaatctgctgcgtattcaggcgttctggagccactaccgctttcgccgtcagaacaccctgcttaattatttactgcaccagcagctgcgcatgaccagcgccatctccagcctgcgccggatgctgctcaactggccgacgccgccggaaaacacgcgcgcggtgatagaaacgctgctcgtggcccttgcgcgcccggatgcagacatctacacggtcgcgcgaataatcgccccgctcgcccccgtggatgaatatgattatcgccatcgcgccttctggcagcggttgaattacttttgccgcctctacctgcgcagcagccgctggattaacgcggttgagaacgccacgccggttacggagttcaacgttcccgggagcccggctctcgcccgccatactgactacctggaggcgctgtggagcggttttcgcaccttttgcgcgctgatgctggtgggcgcgtggagtatcaccacgcagtgggagtccggtacggcggccctgacgctcgccgccatcagctgcgtgctttactccgtcgcggcctcgccgtttaactcgctgacgctcctgctgcgcaccctggtgctgctgtcgctgttcagtttcgtggtgaagtttggcctgatggtgcagataagcgatctctggcagttcctgctgttcctctttccgctgttgaccaccatgcagctactcaagctgcagatgccgaagctggcgggactgtggggacagctgattgtctttatgggctcgtttatctccgtgacgaatccaccggtgtacgattacgccgattttctcaatgacaacctggcaaagatccttggcgtggggctggcgtggctggccttcgcggtgctgcgtcccggctccgatgcccgcaaaagccgcaggcatatccgggagttacgccgggggtttgtcgaccagctcagccgcaagccgcatcttcgtgagagtgagtatgaatcgctggtttatcatcacgtcagccagctcaataacagccaggacgcgctttcccggcgctggctgctgcgctggggcgtggtgctgctgaactgctcgcacgtggtctggcagcttcgcgggtgggaaacgcgttccgacccgctgtcgcaggtgcgtgacgtttgcatctccctgctgcgtgatgtcatgagcgaacgcggggtccagcagcggccgctggaagccacgctgaatgaactgcagcggatctgcgatacgcttgcacgacatcatctccccgccgcccgcgatttggcctcgataatctggcggctgcactgctcgctgtcgcagctggaacaggcaccaccgccgggtacgattggagatcagatcacgccgcaggcataacgcgccccgccgccgccaagcggtttaggctgatcggacatattgtcgccgccgacatggatcatcagcgctttgcctttcacctcatccagctttttcagccgcggcgcgacaacgggatcggtggctttaccgtcgttattgaccaccagcacgggcagatcgcccagatgtcccatgccttccgggccctcatgcttgccggagtgctgcgggtcaaggtgaccgcctgccgctcccgcagccgacggtttcccctcttttaacgcgggctgacagcttcctttagcgtgaacatgaaaaccatgctcaccgggagggagtgctttgaggttgggagcgaactccagtcctttatcggattccgtgattttcactgttccgatggactgacctaccccctgagaggtgacgagattcatttccacttcgtcgctggctgcctgcgcccctgcgcaaacaaccagcgcgaccattgccagagcaaaacgcttcatatgacctccgctggttattttttgccccttaagtgtataccaggggcaaagatttcaccggaaagtcatcttctggcggtttatggcacgtcgtaacccagcgcagccttgcggatgcggtaccactgctggcgggtcatctgcagctcttcagcggccagtgcagaacgcacgcgttcaattttgccagaaccaataatcggcagcggttttgacggcagacgcaggatccaggcgtaaaccacctgttcgatgctctccgcgttcagctcgcgggcgatggtgtccagctcgttacgcagcggctggaattcatcatcattgaacaggcgtccgcctcccaggcatgaccaggccatcgggcgaatgcgcagctgctgcagctggtcgagagtcccgtccagcagcagcggctgatgtaccggggagatctccacctggttggtagcgagggtaaacggcagacgagactgaagcagcgcaaactgcgccggggtaaagtttgaaacgccaaagtgacgcactttgccactctgatgcaggttcaggaaggcttcagctacctcgtcggcatccatgagcgggtccgggcgatggattaacagcaggtcgatacggtcggtcgccaggttgaccagagactgctcagcgctcctgatgatatgcgcgctgtcggtgatgtaatgcccaagggcgtgttccggttttgccgtggtggcaatcccgcacttcgtgacgatctccatgcggtcgcggagtgccggaaccagcttgagcgcctcgccgaatgcggcttcacactgatagccaccgtaaatatccgcatggtcgaccgtggtaacgcccagatcgatatgctcttcaataaagctcgccagctggaggggggacatattccagtccatcagacgccagtagcccatcacaaaacgggagaattctggcccctggggggcaagggtaattcgctgaaccataacattttcctcaaggacgtgatgtcatgagtatacgcaattaccgtgttaaaaaagtgaaggttgctggggttcttcggtctcaccggctttgtttgcgcgtattttgcgcagaagacgctgacggcagaggcgtaacacctcctgcttttgcgtgtcgctaaagttttgccagttaaaacgctcgtcgcgggtacgcatgcacccgcggcaatatccgcgttcatccacctgacaaatcccccggcacgggctctggatggggaaaaactccagctgctctgccacactcacctccggataaccactctcacctacagtgaagacgctaaacgcgccacgtgcaaggcctataccacatatttgtggcattaaggtttcactaatcttcccgctttatactcggcccatcatgacaatgacaggtttaccgatcgatgtggttaatcaaaaagttacaatgtaacgacattaaatttactctgggctgtgcactcttctttacgctaatcaacgggctgtttatccagcgcagctgggccattattgcccctgcgcacctgcacgacatcctctttgccgcgtccgtaccgctggtgctgttttgcggctgggtgattgtctttagcctgctgaatatcccctatatccgtaagccgctgctgatcgtcttaacggtcggatgcgccgcggccacctactttatgtacacctacggcgcggtgatcgatcagaacatgattgtgaacgtgttcgaaaccaactctcaggaagcgacagccctggtgaccccgcagatgattctgtggattgttatcgcaggcctcgttccctccgtggtgctggcgttgacccgcattcataccgggaaatggtggtatgccctgctgacgcgcgtcgccgcgatgctcggtgccctgctggtgattatcctgattgcggcgctgttttataaagattacgcgtcgctgtttcgcaacaacaaaagcatcgtcaaaatggtgaccccggccaactatgtcagcgccgtggtgaagtacagcaaaatgcgctggtttgcaggcgatcaaacgctggtgcggattggcgaagatgcccataaaggaccgttgattaccggccagcaaaagaaaaccgttctggtgctggtcgttggggaagcctctcgcgcggcgaactactccctgaatggttacgatcgtgaaacgaacccggagctgaaaaagcaggatgtgattaacttcccgcaggcctcctcttgcggcaccgaaaccgccgtttccgttccgtgcatgttctcgggcatgacgcgcagcaaatacgatgccgacctggctcaccatcaggaaggtctgctcgatgtgctgaagcatgcggggatcaacctgctctggcgcgacaacgacggcggctgtaaaggcgcctgcgatcgcgtgccgcataccgatatgacgcagtggaatctggatcagttctgcaaagacaaatcctgtattgatgatgtgaatttctaccgtctggacaacgtgctggatggtctgaagcaggacacggtgctggttatccacctgatggggagccacggtccggcatactatcgccgttacccggacaatttccgtaaattcaccccaacctgtgacaccaatgaaattcaggattgcgaccatcaggcgctgatgaatacctatgacaacaccatcctgtataccgacagcatggtcagcaaaaccattgatgcgctgaaagcgcgccaggcaagcatgaacaccgccctgatttatctctcggatcacggcgagtcactgggtgaaagcggcatttatctgcacggtacgccgtacatgctggcgccggagcagcaaacgcacattccgtttatgttctggctgtcaccggactacgcgaaaaactttggcatcaatgaacagtgtttacgtgaccacgctgcaaaaaatgcggtttcccaggacaatttgttctcgaccgtactgggtatgatggacgtgaaatcaaacgtttatcaacagcagctggatattctgagcacatgtcggcaataaactcgcttgcattagaccgaacggtctattagagtgcggccatgagcagaaatactgaacacgatacccgcgaacatctcctggcaaccggcgagcgtctttgcatgcatcgcgggtttaccggtatggggttgagcgagttattaaaaaccgctgaggtaccgaaggggtcgttttatcactacttccggtccaaagaagcctttggcgtggcaatgctggagcgtcattacgcgggctaccaccagcgtctggcgacccactttgcgtcgggtgaaggaaactatcgggatcgtgttctgaactactatcaggaaacgctgaaccagttctgtcagcagggcattatcagcggatgcctgacggtcaagctgtctgccgaggtgtgcgatctttccgaagatatgcgctcggcgatggataagggtgcccgcggcgtgatcgccctgctggcacaggcgctggaaaaaggccgcgacgaaaaaacgctggcctttaccggcgaccccttaatgcagtctcaggtgctctattccctgtggttaggggccaatctgcaggcaaaaatttcgcgcagtgccttgccgctggaaagcgcgctggcacatgtgaaaaacagcattactgcgcctggcgtataacgggcgctttttatttatcttattactagtcgactggtctactcaggagtctttatgtcagctgaaaaactgtttaccccattgaaagtgggtgccgtcacggcgccaaaccgcgtgttcatggctccgctgacccgtctgcgcagcattgagccgggtgacatcccaaccccgctgatgggcgaatactaccgtcaacgcgcaagctctggcctgatcattacggaagccacgcagatctctgctcaagcgaagggttacgccggtgcgccgggcctccatagcccggaacagatcgcggcatggcagaaaatcaccgcgggcgttcacgctgaagagggccgcattgcggtccagttgtggcataccggtcgtatctcacacagcagcatccagcctggcggtcaggcaccggtctccgcgtcggccctgagcgccaatacccgtacgtccctgcgcgatgaaaacggcaatgcgatccgcgtggatacctctatgccgcgcgcgctggagctggacgaaattccggggattgttaacgacttccgtcaggccgtggccaacgcccgtgaagccggttttgacctgattgagctgcactccgcgcatggctatctgctgcaccagttcctgtcaccgtcgtcaaaccatcgcaccgatcagtacggcggcagcgtcgaaaaccgcgcccgtctggtgctggaagtggtggatgcggtatgcaaggagtggagcccggaccgtatcgggatccgcgtctccccaatcgggtctttccagaacgtcgacaacggcccgaacgaggaagcggacgcgctttatctgattgaagagctggccaagcgcggtattgcctatctgcacatgtccgagcctgactgggctggcggtaagccttacactgaagccttccgccagaaagtgcgcgagcgcttccacggggtgatcatcggtgcaggcgcctataccccagagaaagccgaagacctgatcggcaaagggctgattgatgccgtcgcgtttggccgcgactacatcgccaacccggatctggttgcccgtctgcagaaaaaagcggcgctgaacccgcagcgtccggaaagcttctacggcggcggcgcggaaggctacaccgactacccttctctgtaatctcgccattgttcattgatagcggcgacacttcgccgctatactaaaacatcgtttctgttcaaaaagcttttttattccattggttaatgaggaaattatgcgcctacttcacaccatgctgcgcgttggcgacctgcaacgttcaatcgatttctacactaacgtcctgggcatgaagctgctgcgcaccagcgaaaacccggaatacaaatactcgctggcgttcgtgggttacggcccggaaacggatgaagcggtgattgagctgacctacaactggggcgttgacagctatgagctgggcacggcctacggccatatcgcgctggaagtagacaacgcagccgacgcgtgcgaacgcattcgcaaaaatggcggtaacgttacgcgcgaagcgggcccggtaaaaggcggcaccaccgtgattgcgtttgtggaagatccggacggttacaaaatcgagctgattgaagccaaagacgccggtcgcggtctgggcaactgatccctcagggcgcaacgtgcgcccgtagttttactgcatcaccccgcaaaatttgccataatgcgctctgctttttccccatgtaagagaccctgatgtccgataacgctcaatttagcggtctgtgcgaccgttttcgtggtttttatcccgttgtcattgatgtagaaacagccggatttaacgctaaaaccgatgcgctgctcgaaattgccgccatcacgctgaagatggatgaacagggctggcttacaccggacaccacgctgcatttccacgttgaacctttcgaaggggcaaatttacagccggaagcgctggcgtttaacggtatcgatccacataacccgctgcgcggtgccgtcagtgaatatgatgcgctgcacgccatttttaaaatggtgcgcaaaggcatgaaggagagcaactgcagccgcgccattatggtggctcataacgcaaccttcgatcacagctttaccatggccgccgccgagcgggccgcgctcaagcgcaaccccttccacccgtttgtgaccttcgataccgccgcgctgagcggcctggcgctgggacaaacggtgttatcaaaggcctgtattacggctggcattccgttcgacggcacgcaggcgcactccgcgctgtatgacacggagcgtaccgcagagctgttctgtgagatcgtcaaccgctggaagcgtctgggcggctggccgctgccgatggatgatgaggccgagcgccaatcgtaggtcgggtaagcgcagcgccacccgacaaaaaaaaagcgaccacatagcaggtcgcttttttatttccgcagaaagttactctgcgtccggctcttccgttttgtacttcgccgcggtttctttgatcagctgctgcagttcgccgcgctgatacatttcaatcaggatatcgcagccgccaaccagttcaccgtctacccacagctgtgggaaggtcggccagttcgcgtacttaggcagctcagcgcggatgtccgggttctgcaggatatcaacgtaagcaaaacgctcaccacaggcagacagcgcctgaaccgcttgcgcggagaagccgcagcttggcagctttggagaacctttcatatacagcagaatcgggttttcagcgatctggcgctggattttttcaatagtggtgctcatgtcttgcttcctttaacttctgttacggcattcgtctgacattgtagcggttcagactggcatcggaaaataacatttttgtcacgtatagacattctaccccgagtcacgaaaagttgcattgcaaatggtgtttacccctgcggcggccagggttttgcttagggaatgggcaaatgtacgacagaacgatgaatttttttgcacttgctaacgaaacaggattagagattgaaaaatggtattaactttctggctttttatggattagaatcgacgggctttgtaaatcacacgcgggtattattgatgacctgcatttatcaggggactgcccagtggcgcggataaataaaatctcgatcacgctctgtgctttactgtttacttcactcaccttcacgccagtggcaaacgcctctcagcaggcgcggcattctgctgtacaaaaaaaccatctggtgaaagccacagaacgtaagaaaaaaaccaccgctaagaacgacaagaaaaagacaaccacacagactaaaaaaaccgcttccagcaagacgaaaaccacttcttcccgcactgcccacaccgccaaaagtaaagcttcgcaaaccgccgctaacctcgtgactgaaaaatgcatcgcgcgtaaaggccataaggcgaaatgcaccaaggtcacaaaaatagcggaagtgcataaagtgcgcgtccagaaagcgcaaaaaaccgcaatgaacaagctgatggggcagattggcaaaccgtatcactggggcgggacttcgccacgtaccggttttgactgcagcggcctcgtctattacgcctataaagatctggtcaagttccgcattccgcgtaccgccaacgagatgtaccacctgcgcgacgcttccccggtcaaccgtggagagctggagaatggcgatctggtcttcttccgcacgcagggccgcgggacggctgaccacgttggcgtctatgtcggcaacggaaaattcatccagtcaccgcgtagcggccaggatattcagatcacctcgctcagtgaagactactgggtgcgccattacgtcggcgcgcgtcgcgtgatgacgccgaaaaccattcgctaacccctgtcctgccacacccgtggcagggtaagttcctcttttgcatactctttcaatttgctatcctgtccttgttgtctgtgtggttattggcaacacaaaatacaataaggagagaagcaatgtcgttcgaattacctgcactaccgtatgcaaaagacgccctggccccgcacatttctgcggaaaccctggaatatcactacggcaagcatcaccagacgtacgtcaccaacctgaataacctgatcaagggcaccgattttgaaggcaaaacgctggaagagatcgtccgcagcgctgagggtggcgtattcaacaacgccgctcaggtgtggaaccacaccttctactggcactgcctggcgccaaacgccggtggcgaacctgtcggtgaactggctaccgccatcaacgccgcctttggcagcttcgcggaattcaaagcgaagttcaccgatgccgccatcaagaacttcggttcaggctggacgtggctggtcaaagaggcggatggcaaactggctatcgtgtctacctctaacgcaggcaccccgctgaccaccagcgcgaagccgctgatgaccgtggacgtatgggaacacgcttactacatcgattaccgcaacgcgcgccctaactacctggagcacttctgggcactggttaactgggactttgtggcgaagaacttcgccgcgtaagagacacgcagaagggttcgcccttctgcgtttttggtttattccgcagcgcaggctgcttctggctgtttacgacccgacatcatcaccagcagcagaccgagcgcggcaataatcgcccccatcaccggcacaaaactgtaccccagcccaccggaaatcacggccccaccggccgccgcaccgagcgcattgcccaggttgaaagcaccaatattgaccgaggatgagaggcccggcgcttcatgcgcgacgcgcatcacgcgcatttgcagcggtggcaccaccgcgaacgttgcagccccccagacgaccattgcgatcgcggcaccaaactcgttacgcgccagccacggaatggcgatcatgataacaatcagcagggttaagaagcccttcagcgttccgctcacggaacggtcggcaaatttcccgccgagatagttgccaatcgagaagcccacgccaatcagcaccagcatcgcggtcacaaagagaggcgttgcgtgggtgatgtcatgcagcacaggtgaaatataggtatagagggtaaacatcgcccctgcccccagcacggtggtcagcagcgcggagagcacctgcgggcgcatcagcaccgccagctccttacgcacttccggacgttctccggcgctgccctttggcagggagaagaacaaggccaccatcgcgaccacgcccagtccggccgtcgccaggaaggacatccgccagccaatgacctcgcccagccaggttgccgcaggaacgccgccgatgttagcgatggtcaggcccataaacatggtggccacggcgctggcctgcttgtgtttcggcacaacgcttgccgccacaaccgaccccagcccaaagaacgcgccgtggttaaggctggtcagaatacgcgacagcatcaacgtggtgtagtccggcgaaatggccgaaagcacgttgccgagggtgaaaatcgccatcaggaaaatcagcgcattgcggcgcgcgcggtgtgaaagaagaagcgtcatcagcggcgcccccaccatcacgccaatggcgtaggcgctgattaacatgccggccgcagggatcgagacgtccacgccgcgggcgataacgggcagtaaccccatcggggaaaattcagtggtgccaatcccaaaagcgccaatcgccagggccagcaggggaaaattgattttcatgcgtcaactccggatgccgtgtcatgtggtgacacagaacaaagaagcggaaagcatgacatcaatcacaaaaaatgagaagttaacaaaatggcaaaagatttttgccttaggagtaacaatcggggggagcgggagggagaaggctctccctccgcgtaaatcagtgcagcgcggccgtcagacccgccgcgacaatcagagccagcacaaccacggtggtgaacagcgaaaacttcagatcggaactcatcaatttttctccttttaatccccccacgaaaagtgagcctgctcatttttgcataatttacgtcaaaaatcttcctggatttaggctgataaacactttacctcttccccttttcatcaagataggacaaaattccacgctaaatttattagcgtaccggccattgaccccctcctgacgtcccgtgtcgttttcccggcgtgccgcaattcaagattgcgtgataagggtgagagaaggcaaacgtttaccttcaagtttttcaggagtttaggatatggtctggagtgacatttaatggcaacaattaaagacgtagcaaaacgcgcaaacgtttccactacaaccgtatcacatgtaattaacaaaacccgctttgtggcggaagagacgcgcaacgccgtctgggcagcaatcaaagagctgcactattcgccaagtgcggttgcgcgcagcctcaaggttaatcacaccaaatccattggattgctggccaccagcagtgaagcggcctattttgccgagatcatagaagcggtagagaagaactgcttccagaaaggctataccctgattctgggcaacgcgtggaacagcatagaaaaacagcgcgcctacctgtcgatgatggcgcaaaagcgcgtcgatggcctgctggtgatgtgttccgagtacccggaatccgtgctgtcgatgctggaagagtatcgccatatccccatggtggtcatggactggggtgaagcgcgcgcggacttcaccgactccgttatcgacaacgccttcgaaggcggttacatggcgggtcgttacctgatcgaacgcggtcaccgcgagattggcgtgatcccgggtccgctggagcgtaacaccggcgcgggccgtctggccggttttatgaaagcgatggaagaagcgctgatcgccgtgccggaaaactggatcgtacagggcgactttgagccggaatcaggctaccgcgcgatgcagcagatcgtttcccagcagcaccgcccgaccgccgttttctgcgggggtgacatcatggccatgggcgcgctctgcgccgccgatgagctgggtctgcgcgtaccgcaggatatttccgtgatcgggtatgacaacgtgcgcaacgcgcgcttcttcaccccggcgctgacaaccattcaccagccaaaagattcgctgggcgaaacggccttcaatatgctgctggacaggatcgtcaacaagcgcgaagagtcgcagtccattgaagttcacccgcgcctgattgaacgccgttccgttgcggacggtccgttccgcgactaccgtcgttaatccctttacggggccagctacgctggctcccgtaaccattcccggtttagggtttcgctgtcccccagataatccagcagccaggccatggcgggcgagacatcattttgttgccaggtcaggcagcaggccgcgtccgggaacggattctccagcgtcagttcaacccattctccggtatcgatgcgcggacgcgcaaaatgagcgggcaccatcgcgacgcacagcccggcgctgaggcacgtcgccgatgattcccagtcaggggccaccacccgccgctggttgtccagaagccaggtgatacgcttgggcaatgaacgggacgtatcctccagcaccagcgacggccagttgcgcagcgtatcgtcgctcagcggaccttccatcgctgccagaggatgatcgctggccaccacgcatttccagctcagcatacccatgtcgcgaaaggcgtaacgtcccccgaccgggatcgcctgcgtcgcgccaatcgccatctccgccctgccgtccgccagcgcatcccagacgccgttgaacacctcctgcgagacccgtagctcgacgtcagagaaatgacgatagaaatccacgatcatttgtcgggtgcgttccggcttcacgatgttatctaccgcgatggcgagatgtccccgccagccgttggcgatctgctgacactgttcgcgggtgatctgcatttttttgataacagaacgcccttctttcaaaaaccacgcgccggcgggcgttaattccacgtcgcgatgccgccgttcaaacagcggaaccgccagccactcctccagttgacgcaccgtgtagctgatggccgaagggacgcggtgcaactcctgcgctgcaccgctaaagctgccgttacgcgcaacagcatcgaccacttcaagagaataatctgaccacattttctgcctgcaaaaaatttgaatgcacccgccaaatattagcgtttcacaagccgctttgcactccctacactctgcgccaacgtacacctgcctcctcaggagaataaaagaatgcaacccaggaaaggatttttagtctggctcggcggcttaagcgtgctgggctttttggccaccgacatgtacctgcccgcgtttgccgcgatgcaggaagacctgcaaacccctgccgcggccatcagcgccagcctgagcctgttccttgccggttttgctttcgcccaactgctctggggacccctctcggatcgcttcggtcgtaaaccggtactgctgctgggtctggccatttttgccgtgggctgcctggggatgctgtgggtgcgcgatgctacctggctgctggtgctgcgcttcgttcaggccgtgggcgtctgtgctgcggcggtgacctggcaggcgctggtgaccgactactacccggctaaccgcacaaaccgtattttcgccaccattatgccgctggtgggcctctcccctgccctggctccgctgctgggcagctggatcctcgcgcactttgactggcaggccatttttgccacgctgtttgccatcacgctggtgctgatgctgccggcgtttgcccttaagcccgcgcataaaaaagaggcgcatgccgacgcgacgccgattaccttcacctccctgctgagcgccaaagcgtatcgcgggaatgtcctgatttatgccgcctgttcggccagcttcttcgcgtggctcaccggctcgccgtttattctgcacgatatgggctacagcccggcggccatcggtctgagctatgttccgcagaccatcgcgttcctggtgggcgggtacggctgccgcgcggcgctgcaaaaatgggaaggtcagcagatgctgccatggctgctggtgctctatgcgctgagcgtcatcggtacctgggccgtcgggtttattccgggcgcgggtctggctgaaattttggtccccttctgcgtgatggccgtggcaaacggagcgatttatccgatcgtggtggcacaggcgttacgtccgttcccgcaggcgacaggccgcgccgccgcgctgcaaaataccctgcagctgggtctgtgcttcctcgcaagtctggtggtctcggcgctgattgccacgccgctgttgaccaccaccagcgtgatgctgttcaccgtagcgctggcggtattgggtttccgcatgcaggcgtccgcgcagcgcgagcaggataacggcgcgcaggtggaaacttcgcatgcctgattgcgccagaaatcatgttacatttcagtgattaggttgctaacaattttctattgaatcaccaaattttgaggcctatactaaatttggttcgattaaatacgataaatattaagtgttaacgggagccggagtgctcccgttttaccatggaaggcatttcggcaagggttatctcccttcctctgttctacgtcggatactagcctcgcggtatttaccgtgagatttctcacaaaccaaaaaaagcgtctacgctgtttgaaggttctgatcacatcagggtgatggagaagctatgagttcatcgtgtatagaagaagtcagcgttccggacgacaactggtcccggatcgtcagtgaactgttaggtcgagcaggcatcactatcaacggatcttcgccatccgatccccaggttaagcatcccgacttttttaaacgcgtgttgcgggaaggatcgttaggcctgggagaaagctatatggacggctggtgggagtgcgaacgtctggatatcttttttgccagcgtgttgcgtgccggtctggaaaatcaactcccccgcaatctgaaagacacgctgcgtgtcgcctctgcccgactgtttaacttgcaaagtaaaaaacgcgcatggatcgtcggcaaagagcattacgatctcggcaacgacctgttcagccgcatgctggaccctttcatgcaatactcctgcgcctactggaaagacgcgtcgacgcttgaggaagcacagcaggccaagctgcgcctgatcagcgagaagctgcagctacagcccggcatgcgcgtgctggatatcggctgcggctggggcgggctggcgtattttatggcgaagcactacggcgtcagcgtggtcggcgtgacgatctcagcggaacagcaaaaaatggcgcgggagcgctgtcagggtcttgacgtggatatccggctgcaggactaccgtgacctgaacgagcagttcgaccggatcgtttccgtcggcatgttcgagcacgtggggccaaaaaactacgacacctactttgaggtggtggatcgtaatttgaaacaggacggcctcttcctgctgcacaccatcggctctaagcggaccgacatcaacgttgacccgtggatcaataaatacatctttccgaatggctgtttaccgtccgttcgccagattgccaacgccagtgaatcccatttcgtgatggaagactggcataactttggcgcggactacgacaccaccttaatggcatggcatgaacgtttccagaaagcctggcccgagattgcggacaactattcagaacgatttaaacgcatgtttagctattatctgaatgcctgcgcgggggcgtttcgcgcacgggatattcagctctggcaggtggtattcagccgggggattgaacacggactgcgtgtcgcacgctaaaaaaataaccccggatagccggggttattttttattcttcttctgcggtctttattattgcggcttcttttgctgccagcacgcgctccaccgtatcaaccacggcctgggtttgcggatcgatttcgatattcacgcgatgccccaattttttcgcgcccagcgtggtgcgctgcagcgtttcaggaattaaatgcacgcaaaaacgcgttggcgtcacttctcccaccgtcaggctaatcccgtcaatgccaataaatcctttatagaggatgtatttcattaatgacgggtcctgcattttaaaccagatttgacggttattttccgaggtcacgattttcgccacttcggcagtggtcatgatgtgccccgacatcaggtgaccgccaatctcatcgctgaacttcgccgcgcgctcaacgttgacggtatcgccaaccaccagctcgcccaggttagtgatccgcagcgtctctttcattaaatcaaagctaatctggttgccgttaatttcggtcacggtcaggcagcagccgttatgggcaatcgaggcgccggtttcgatgccctcaagcatatattccggcagctcaacaacatgagtacggaaattaggtttttcatcaatggacaccactttggcagtgccctgcacaataccagtaaacatgcttacaactcctgttttttccgaacggtgatgacaccgtttaatccctccacaataacagttggaaaaacaggttgccagcggagcgcattttctggcgattttttcactagataaatagctaaagcccgctacaatagctggcacccccctgcattttcttcttgctgcccgtttcggcggcttttttagtctctcatataactacaaaataaaggtgttcacgtgcagaagtacatgaatgaagcgcgccagttattggcactggctatacccgtgatcgtcgcgcaggtggcccagaccgcaatgggatttgtggatacggtaatggcaggtggctacagcgccaccgacatggcggccgttgctatcggcacgtcaatctggcttccggccatcctgttcggccacggtctgctgctcgcgctcacgcctgttatcgctcagctcaatggctcggggcgccgcgagcgcattgcccatcaggtccgccagggtttctggctggccgggtttgtctctgtgctgatcatggtcgtgctctggaacgcgggccatatcattcgcgctatgcataacattgacccggccctggcggacaaagccgtgggctatctgcgcgccctgctctggggggcgcctggatatctcttcttccaggtggcgcgtaaccagtgtgaaggtctggcgaaaaccaagcccggcatggtgatgggctttatcgggttgctggtcaacattcccgttaactatgtttttatttacggtcatttcgggatgccggagctgggcggcgtcggctgcggcgtggcgacggccgccgtttactgggtcatgttcttctcaatgctgaccttcgtgaagcgcgcccgctccatgcgcgatattcgtaacgagaacagattcagcacgccggactggaacatcatgacgcgcctggtgcagttagggttgccgattgcccttgcgctgttctttgaggtgaccctgtttgccgtggtcgccctgctggtctccccgctgggcattgtgaacgtcgccgggcatcagattgcgctcaacttcagctccctgatgtttgtcctgccgatgtcgctggccgcagcagtgacgattcgcgtgggcttccgcctggggcaaggctcgacgctcgatgcgcaaaccgccgcgcgcaccggactgggcgtcggcgtctgcatggccatttgcacggcgctttttaccgtggcgctgcgcgagcagattgccttgctctacaacgacaatccggaagtcgtcgcgctggcctcgcacctgatgctgctggccgcgatttaccagatttcggactccatccaggtgattggcagcggggtgctgcgcggctataaagacacgcgttccattttctttatcaccttcatcgcctactgggtgctgggtctgccgtgtgggtatattctggccctgaccgacctggtggttgaccgcatgggaccggcggggttctggatgggctttatcatcggcctgacgtcggcggcaattatgatgatgttgcgcatgcgcttcctgcagcgccagccatcaacaatcattttgcaacgcgctgcacgttaaatacgcagtagccgccgcccggcggctactttctcttcactttgcgcggtaatacagcaatcgcgtgaaatcagagagaaaattgcattttccctcttgccacctcggtgctgtgccgctaatatttgtccccgttgtcaccgacaacacgttgcgttcatagctcagttggttagagcaccaccttgacatggtgggggtcgttggttcgagtccaattgaacgcaccattctgcgtccgtagctcagttggttagagcaccaccttgacatggtgggggtcggtggttcgagtccactcggacgcaccatttcagtcctgaaatggtgcaaattctcctcagttaccctgaattttcttaatcccttattttcatcattattctcctgctacgcttttcctatggaaaaaaacacaggaaacgtgttgatgaagaagatcgcgattatcggctccggccccacgggaatttacaccttttatcatctgcttaataacaataccccactctccgtttccgtctttgaacaggccgatgaagctggcgtgggcatgccctataacgatgacgataattcccggctgatgctggcgaacattgcgagcattgaaatcccgcccatttttatgacctacctcgactggcttaaggagcaaagcgacgaccatctggcgcgttttaaagttgataaagccagcctgcacgatcggcagttcctgcccaggctcctgttgggagagtattttcgcgacagctttcgttcaatcgttaaagaggcgaaaaagctggggttccaggttgaggtccatgaatctgcgaaggtcaccgacatcaacccttcgacaaccggcgtgacgatttcggtcaatgaccgcacattagcggataaattcgacctggcggttattgccaccggccacgtctggccagaggaggatgaagccacgcgcacgttcttcccaagcccgtggtccggcctgatggacgcccgcattcccccttgccgcgtgggcattatgggcacctcattgagcggcctggacgcggctatggcggtgttgatgcagcacggcgagtttcgtgacggtaaattcatcctcgacagcggcagcgaagggttaaacattacgctgatgtcccggacgggcattctcccggaagccgatttttactgccccatcccttatgaaccgctgtcggtattgaccgaattcgtagtggaaagcgagatagccaaaggaccggatggcctgcttgaccgagtctttgccctgatggtgaaagagcttgaactcgccgacccggcgtggtgcgagaaaatgtctctgcgtacgcttaatgcggacaccattcgtgaagcctggtttgaggatcgtaagcgccacgggccctttacctgggcggaagagaatctcaacgaggttgaacgcaataaacgcgaacggcgcaccgtggcctggcgctataccgtccttcgactgcatgaggtggttcaggagattgtgccccacctcaacgaagaggacagagagcgctttaagcagggcctcgcccgcgtgtttatcgacaactatgccgccatcccgccgcagtctatccgcaggctgcttgcgcttcgcgaggccggcatcattagcgtggcggcgctcggcgatgattacacgcttgatgccggcagcaatcggacagtcatcaccacacaagagaccgtttatcgtttcgacgtctttattgatgcgcgcgggcaaaagccgcttaaaacaaacgatctgcctttcccatcgctgcgcggacagcttgaggagacgggcgatgagatccccgacatcggcgaggattacacgttacaagcgccagaaacggttcgtgggcgcatcgccttcggcgcaataccgtggctgatgcacgatcgtcccttcgttcaggggctggcagagtgtgcggagattgcagaagcgatggcgaaggcggctgaaaaaccggcctcaggtatacggcgtcggttgccgtacgtggagaactgacagggcttccatgccctgcaacgcgagattattcgaagaacacttccgggttttcagacagcgagacgaaggttttcgtcgctttatccagggcgagaattttgccgctttcaatgtcgtatacccagccgtgcaggcgaagcgagttattacgcaggcccaccgcgacggacgggtgggtcttgatgttgctgagctgcgcaaagacgttttcctgcaccatcgcattcactttatcgatcggcttatcccagcttttcttctctaccacggcttttgccgcgtcggaatagcgcagccagtgcgatacagcaggcatcggctccaggttcgcgttatcggcaatcgccttcatcgcgccgcagttggagtgaccgcagatcacgatgtcggtcacgcccagcgccactaccgcgtactcgatagttgcagagacgccgcctggctccggcccgaacggtggaacaatgttgccagcattacgaataacaaagagttgtcccggctcttgctgggtgaccagttcagggaccagacggctgtcggagcaggagataaacagcgctttgggattctggctggacgctaaactgcgaaagagctctttacgttgcgggaaaatctctttttgaaagctgagaaaaccttcaatgatatgttgcatagcaatttctcttttatctgttttcgtttaggcatgatcgagatcacactcgcaaagtttacccaccgtgcttcacttgagacaagcaatatatttctggcccgaccgctgcacgatgtcatcggcgtttgccggaatgttctgcccttcgaacgcgccgtaaagacgggcgaacgattttcccgacaggcgccgggtaacgtcctcaaccgtacgggcaggcagcggaagcatattcgggtagctccacatgaacgacacggcctctttccctggggtcacctgcaaaatgtctcccgccagtaaaacgccctcgccctcctgccagtgcagtaccgttccgcccgcaaaatgcccgccgagacgcagcagcgtaaccgacggtactatctccagcgcatcgccctcccagaaatgaatcgcagggctgtcgcgcatcacccactcgctatcgcttacgtgcagatagaccggcgcgtcgaaagccgcggcccactcctgcatcgtggtgtaatagtgcggatgcgaaatcgcaatcgcgcgaaggccgccgagtgcggcgatgagcgtttgggttgcaggatcaaggttggcgatgcagtcccagagaatgttaccgtggggggtacgcaggaggagtgcccgctggttaatggcaaaagcgggtaccgtcttgatactgaataactgcggctccagctgctgccatttgttggcgtgtgtcgccgttaccgtcgcgtaatcgatccacgcctggccgctggccggaacatactgacgttcatcctcgcaaatggcacatctctccggcgttccctcataagaagtaccgcaggttctacagagtgtaatcatgagcgctcctcagtgataaagcactgagtatggcagggattatccttatgtgctgcgaggtacattgctggcgttttttaccctatactgtgccagtatcaaaaaaccgaatagagcaggtgcaagatggaaattgatctcgataacttagtttttaacggtctggatgaagcggaagagcgtaacgcagaacgtctggacgatgcggataaaaaagcgcaggcgattattgccgacgacgactgcggcgacgcctgcaagatctgataaaaaagcaccggaaaaccggtgcttttttcaatgcggggaagattacagctcaggcgtctttttaaaccccgttagcatcagaaccaggctttctgatgaagacgccggttcgaactggtaatgattcccctggcggtcaccgccgatataccacgagatttcggtttttccttccgccagcgccttgcgcacggctttgtccacgttcaccatcctgtattcacgagaatggttcagatagagcactgcgtcggagcgatagttacaggccggacgcgaggcccatcttacggtagcaggatcccagtcattgctggccggatagaagaagatctgatcggcaccgttagtttccactttgccgccataaatccgcacgcggtacgtaaactgcgaaggatcctgcccggcaggcagagggggaatgtggaacttcaccagcgacagcgtttcgctgtttttcgtgcgccccccgttctgccagttatcctgcaccagtaaaacctgcggttcgggctgggagaggtctggctccaggctgctgagccagacgttggccttcgctctggaataaccatacgggacggtggtgccacaatctaacccgcggttcatgcacaggtcagtcataaagcgcgcggcgtcttccgtccagccgttcatgaaatctgcatgcgccgtatacaggctaccccaccgctcttctcgctcatcgccgtgcatgatggggtccatggagagctgcactttgctggtatcaagcgagccaatcgtcgggagtacgtaagcaatgttcatgttcacggtgggaattttcaccgggaaggtggacgggcactgccccttgacgtcgtaggtggcgttaatcagaccatgggcaggcttcaggttcactccatcccagcagttaggaaactgaatgccgatattaaactgcacggcatcgttcgccttgcgcaagccgcagacctcaccggttttggtggtgtaacccttgccgttggcacataaaaaggtgatatgtggattcggcgcactaccatgatggtcgcccgccagcagcgacagccccgccgggaaagggtgtagcggccaggcgtccacgttcgatgcctgataataggttttttgatacgccggtttgacgaccgtgccgtcaggcaggcgaagcgaaggtgcccagtaggcagagctgtcggctttgttatcgcaggtggtcttttcatcccggcgcagggattcacggctggagttagcatccgtttgcacgttgccgaagaagtcgtgcagcatggcctcgttgggcatgccgtacatcataatggcgtcatcgccaagggtatgggaatagccgcaaacaacatgcgcctgcggtgcggcgtgtgccgcatgaattgtgaaaagtagagcagggacagaaagcgcgcgtgttaacgtggtccgtttcatcattttctccatgactgaaaggacacattggtaacaaaagcgggctaattaaccgaatgattcagagcgtacttttccgtcttttgaggctttacagacgtcacgcacacctcattccagtacatttcgcgcgtgcggcgcagttcagcgtggcgttttatcatggaaccactccgggtcaatgttggcaacgtctacgccatacaggctggcgacaggcagtatcgactcaagaacacgttgcgcgctgttctccgcattcgcgggtcgggtcgcaaaaaaccgccgtaacgtgctgatccattttttcatcgtcttaccctctctcactgtatctgccttcagttaagcaccccactcccgtgcaggggaaataccaaaatccactgtcgatgtgcaggatctgcaaatagcgccccgtccttttcacgcttcattaacaccttgttcactaatgcttttttgctcatagcaaagaacgatttcttatttggcgatagctttcccttatgggagcgtaacggggtaaaacaaaaacaacgggatggcgtatgactatggcagcaaaaatgaaagggtttaaaaaacggacgctggttctgggcgtagtggcagcctggggcctgttttcagcgcaggcgcaggccgatcagctggcggatatcaaggcagcaggggtggtgaaagtcgccacgtttgatgccaacccgccgtttggctcgattgatgccaaaacgcatgagatcgtgggttacgacgtggacttcgccaaagcgctggcaacatcgctcggcgtgaagcttgagctggttgccaccaatccggccaaccgcattccgctgctgcagtccggcaaagccgacctgatcgtggcggatattactatcaccccagaacgcgcacaggtcattgatttctcgacgccttacttcgttaccggccagcagttcctcgttccggcgaaatctccggacaagctcgatgactacagccgggcgcgcattggcgcggtcaaaggcacgacgggcgagcaggcgctgcaccagcgcttcccgcagtcccgcgtcctctcttatgacgatattccgctggcgctgaccgcgctgcgcaacggcaacgtacaggccatcactcaggacagcaccattctggccggtctgctggcgcaggcgccggataaagccaacttcaaaatcctgcccgacctgctgagcaaagaagagattggcgtcggggtggaaaaaggtgaaacggcgctgctgaaagccgtcaacgatgagctggtcaatctcgagaagaccggtcaggcggctaaaatctacgacgtctggtttggtcctggcacccctgctccacagccccgcgcctttaaaatagaagccagataatgatgctctcaggtttattttcccactccgcggccggtgccgcggatttttcacatctggaacaggccagcgtcgagtttcgtcatgtggacaaacgctacggtgaccatcaggttttgaacgacattaacctcactatcacgcccggtgaagtggttgccatcctcggcccgtcgggttccggtaaatccaccctgattcgtcttatcaaccagcttgaacccctgagcggcggggagatcctggtcgacaacaagcctaccggcaggctctccggtagcgggctgcgccagctgcgaagccgcgtggggtttgtgtttcagcagttcaatctttatgcccacctcaccgccagccagaacatcaccctggcgcttgagcacgtccacggctggaagccgctgcccgctcaggcgcgcgcgctggccctgctggagaaagtcgggatgctggaaaaagcccaccattacccggctgagctttccggtggacagcagcagcgggtggcgattgcccgcgccctggcctcgtcaccgcaaatcattctctttgacgagccgacgtcggcactcgatcccgaggtgattggtgaagtgctgtttgtgatgaaagccctcgcccacagcgggatcacgatgatcgtggtgacccacgagatgcagtttgcccgggaaatcgccgaccggattgtctttatcgacggcgggcaaattctggaaaccgcgccgccggcgcagtttttcagccagccatcgcatcctcgcgcgcagcggttcctgcaaaaggtgctggacccgctgcatcaggagcatctgtaatgcccgcgctcgactggcagggagtactggccggacagcctctgcagtggatactttccggatttctcaccaccctgtgggtgacgctggcggggatcgcgctggccagcctgctcgcactgctctttatgctcctgcgcctttcaggcggacgcgtcgggaaagcgatcgtcagcggctgggtatcgctgtttcgcaatacgccgctgctggtgcagctgctgttctggtattttgccgcctggaacgggctgccgcaggcgtttcgcgacgcggtcaacgccgatcacatctggtccattctgcccggcgacgtctggtggtttacgcccgaatttttatgttctgcctgggggctgggcgtatttacctcggcgtttttaatcgaagaagtggaatcaggcttgcggtctgtgtcaatcgggcaacgggaggcggcgctcgcccagggtttctctacgtggcgcgtgtttcgctacatcctgctgccgcaggggctggctaacgcctggcagccggttgtgggacagtatctcaacctgatgaagctctcctcgctcgccagcgggattggcttcgccgagctcacctatcaggtcaggcagatcgaaagctataacgcgcacgcgctggaggcatttaccctcggtaccgcactctatctcctgaccggtctggtcatgggaatggtgctggttcgccttgggccgcaggcgaaacgtaaacgtccgatcgtcgtcaccgcagggagtgaaaaacatgattgccggacttaatgtcatcaccgataacctcgattatctgctgtggggacgcgcggcagccggtgaaccggggggcgtgttgctctcgctgatgatggcgactggagcagccgttatcgccctgcccgcggggattgcgctcgcgtgcctggcctggcgctttaccgggctcgtgcgcaaagccctctttttatgggcagagctgattcgcgggatcccgctcatcttcgtgattttctggatgtggtatctcctgccgctcatcaccgggggcgatctgccgggagcgctgaccgtcacgctggcgctggcctggtttacggcggccaccgtgatgcactcggtcctggccgggctgagcgcgctgccgaccgggcagtacgaagccgcgctgtcacagggattcagcacgcagcaaaccctgtggcgcgtgctgctgccgcaggcgctggggaatattttgccgtctctggtggggatttttatcagcctgctgaaggatacgtcgctggcgtttatcgtgaacgtcccggagctgaccacggtggcgggacaggtcaacaaccgggtgcaaatctacccggcggccatttttatctttacgggcgtggtctattacctgctctgctgctcgcttgagcagcttgcgaagcgctggcaccttacccggccagcgctttaaccaccgtttccatcgcttcggttgtcaattcactgcgtttcacgcgctggttcgccagcgcggtacgcagaacaccggcaatgacaatatgctttggctcctgccctaaatcacgcatctcaagcaccacctttccgaccacccggcacatctcctggtatagcgcttcatctttggtcacgttacccatcgtcatcactccattgcctgttaaacgttgagcttaaatgattctcctgccagatacaaaaaagaagcccggcgagagactcgccgggcttcatctgtaaaatcagtcaattagttgtttactggaatgaccgcgcctttgtacttggtgcggatccagtcctgaatctctttcgagtgcagcacgttcaccagcgcgacgatgtctttcttcttctcgtcaccgcgatgcacggtaatgatgttagcgtacgggttgttttcaccgctctctaccgcaatcgggtcatgaaccggatccagaccggcgtcaatcgcgtagttggcgttaatcaccaccgcgtcgccttcgttattgttgtacatctgcggcagcagagacgcttccacgttaggcgtaaacttcagttttttcgggttctcgacgatgtcgctgatgcgcgcggtgactttatcgatgcccggcttcagcttgatcacgccctctttctcgaagatggaaagaatacgcccctcttcagaaaccgcgtcacgcatgatgatcttgccaccttccggcaggtctttcagcgacttgtattttttggagtagatgccgattggctcaatgtgaatcgcgcccgcactgacaaaatcgtagtccttatcgcccgcatgatctttcagcacgctgttcaggtaaggaatgtgctggaaatagttcgcgtcgatgtcatgacccgccagcgcggtgttcggcagaatgtagtcctggaacggtttaatctccaggtcgataccctgctttgccagaatcggctttgcctgctccagaatttccgcatgcggcgtgttggacgcccccacggtcagggtgtcggcccaggaggcgaagctcagggcgctcagggttgcagcggcgatcagtgtcagtgtctttttcatgatgtggttcctgtgtgttgttgttaccctaaatagttcgagtcacaggaaggcggcaagtgagtgaatccccaggagcttacatacagtaagtgactggggtgaacgaatgcagccaacgcgcctgaggctcgaaatatgacgggtattagcgtttatctaacagtgaagtaatgacatcgccgcagaactggataatgaaaacgatgatcagaatggtcaccgttgccaccagcgtgacgtcaccatggttgcgctggaatccttccagataagccagatttcccaaaccaccggcgccaatcacccccgccatggcgctgtagctcaccagcgcaatcagcgtcaccgtaatacccgagaccagtgcaggtgatgattccggcagtaaaacccgaaacacgagcgtgctcagtcgtgcgcccatcgagcgcgtcgcttcaatcacgcctttatccacttcacgcagggcgatctccaccaggcgtgcgtagaacggtgcggcacccacaatcagcgccggcagcgccgcgttggcgccaagaatggtgccgacaacggtcttggtgaacgggatcagcagcacaatcaaaatgatgaacggaatcgagcggaacacgttcaccacaatcgaaatgacgctatacaccgtgcggttgtggaacaatccgccgcgcgcggttaaaaacagcgccagacccagcaagatgcctaatacaaaggtcgccacaccggaaagcgcggtcatgtacagcgtctccagcgtcgccgcccagagctgatcccacttgagatgcggaaagaaattctcagccatgtttaatcacctcgccttcaatatcgctgtgctgcaggtcggcgaggatattgttcagttgttcatcagatgccacgacgtgcacccagagctgaccaaacacgccatgagcggtttgggtcatttttccgtgcaggatgttaaacggcaggccgtagcgcagcgtcagttcgcccacaatcggtttgtgcgtgctgtgcccggtaaaggtcagcctgatgaccgtcccttccagatcgtttgccagttcggtattgaacgtttcttcttcagcgtactggctcacctgacggacaaactgctgcgtaatcggctgctgcggatgggtaaagacgctcagcacgtctccctcttccaccaccttaccgttctccatcaccgccacgcggtcgcagattttgcgcaccacgtgcatctcgtgcgtgatcagcacgatggtcagcctgaaacgacggttaatatccagcagcagatcgaggatctgatcggtggtctgcgggtcaagcgcggaggtggcttcatcgcagagcagcacatccgggcgattagccagcgcacgcgcaatgcccacgcgctgcttttgcccaccgctcagctgtgacggataagcatgctcgcgacctttcaggccaacgagttcaataagctcggccacgcgggccttaatgtcggctttcggtacgccggcaatttgcatcgagaacgcaatattctcgctgaccgtgcgcgaccaaagcaggttgaagtgctgaaataccatgctgatcttcagacgcgcctggcgcagggcttcaccttttgcggcagaaatgttctgcccgttgatggttacgctgccgctgctcggtttttccagaccattcagcaagcgaataagcgtacttttacctgcgccgctgtaaccgatgatcccgtatatctgtccctgtgctatcgtcaaattgacattatcaacggccgtgagcgccacctttccgttgtcaaaaaccttcgaaatattgctgagaactatcattcttattcgttatccgtgccgcccgcggcggtttagcagtatggatgtccaaacgatagtaaacaggcgttatcagcttttaaatgaacaaaaaagaatgtgttataactttggggaataaatagcggatttaccgggtgggaagcatttagatgaatttcagcaatgattatctacctgatgtatatctgctggctgacaccctgcaaaaacgctcatttttgcagcattttatgcggatatagccatcctcacatccagacaactttacgtcttgctgtcctgacatccaaaaacatcatttatattcctttttgttctaaaaagcagtgaatggttctttcttgagaaaatttcaccgccctatcatcccgtcatgacatccagaaaggaaaacatcatgacgatttatcactccgtcactgaactgattggtcgtaccccgctgatccagctgcataagcttgataccggtccctgctcgctctttctgaagctggaaaaccagaatccgggcgggtcgattaaggatcgcgttgcgctgtcgatgattaacgaagcggaacgtaccggccagctgcagccaggcggcacgattatcgaggccacggcgggcaataccggtctcggcctggccctgatcgccgcccagaaaggctactcgctgatcctggtggtgccggacaaaatgagccgcgagaagattttccacctgcgcgcgctgggtgcccaggtggtgctgacccgctccgacgtcaacaagggccatcctgcctattaccaggattacgcccagcgtctggcgaacgaactgcccggcgcgttttacatcgaccagttcaacaacgaagccaacccgctggcgcaccgcaccaccacggcgccggaactttatgagcagcttgacggcaggatcgacgccatcgtggtaggcgttggctcaggcggcacgctgggcggcctgcaggcgtggttcgccgagcactctccgcacacggaatttgtcctggctgacccggctggatccgttctcgccgaccaggtggaaaccggacgctaccacgacgcgggctcctggctggttgagggaattggcgaagactttattcctccgctggcccacattgaaggcgtcaatcgcgcctggcgcatcaccgaccgcgaagcgttcaccaccgcgcgcgagctgctgaaaacggaaggcattctggcgggctcctccagcggtacgctgctggcggccgcgctgaggtattgccaggcacaagccacgccgaagcgcgtggtgaccttcgcctgcgacagcggcaataaatatctttcgaagatgtttaacgacgactggatgcgacagcaggggctcatcacgcgtcctcaggccggcgatctctctgattacatcgccctgcgccacgatgaaggcgctaccgttaccgctgccccggacgacacgctctccaccgtcctggcgcgcatgcgtctgtatgacatctcccagctgccggtgctggagaacggcaaggtggtgggcattatcgacgagtgggatctcctgcggcatatcggcggcgacggcgatcgcttcgcgctgccggtgacggcagccatgacgcgtcaggtcgaattccttgataaacacgcgccggaaagcgccctgaacgccatcttcgaccgcggcctggtggccgtcattaatgacaacgaccgttttctcggtctgattacgcgcagcgacgttctgaccgcctggcgcaaccgtctacagcaataaaggaatcaatgatgaaaaatctggccaccctcagcgtacacagcggcgaattcaacgaccagcacggcgccgttatgccgccaatttatgccacctcgacgtttgcgcaacccgcgcccggggagcataccggctatgagtactcccgcagcggcaaccctacccgccatgcgctggaaacggcgattgccgaactggaaggcggcacgcggggctacgcttttgcctccggtctggcggccatctccacggtgctcgaactgctggataaagacagccatattgtcgccattgatgacgtttacggcgggacgtaccgcctgattgaaaacgtgcgcaagcgcagcaccgggctgcaggtcagctgggtcaaaccggacgacctggccgggctcgaggccgccattcgcccggaaacgcgtatggtctgggtcgaaacgccaaccaacccgctgctgaagctggccgatctggcggccatcgcggcgatcgcccgtcgtcataacgtcatcagcgtggcggataacaccttcgcgtcgccggtgatccaccgtccgctggagtccgggttcgatatcgtcgtgcactctgccaccaaataccttaacggccactctgacgtggtggccgggctggcgattgtcggggacaacaaggaactggcggataagctgggctatctgcaaaacgcggtgggcggcgttctggatccgttcagcagcttcctgacgctgcgcggtattcgcacgctcgcgctgagggtcgaaaagcacagcaccaacgcgctggcgattgcgcaatggctggagcagcatccgctggtcgaaaacgtgtactatccaggactggaatcgcatccgcagtaccagcttgcccgcacgcagatggcgctgcccggtggcatgatttccgtcgtggtaaaaggcgatgcgcaacgcaccaccgaggtgattcgcaacctgaagttgttcacccttgcggaaagcctgggcggcgtggaaagtctggtgagccagccttacagcatgacccacgcctcaattccgcttgagcaacgcctcgcaaacggcattgtgccgcagctgatccgcctgtcggtggggattgaagatcctaaagacctgattgccgacctcagccaggcgctgcaaaaataagcaaaatgcggcaggtccctcacctgccgcgataagttgtcatcatggcttaacgccttgataacaatattatgtgaaacagcacagattatttctgaaacaccgtttccattttccttttatcttaaaatcagcgtataatgcgcgcctaatccctggtgaatggtttcagcgcttggaatacaaaaaacaacgtacaacttctcctctccttcgttgggctgtcactcaggcacactttcttctgcacgctcatttgatgtctcctatccttagtgcgtgtcatatactcttttgcaacacaggtttgactccgcggcggtgcgcccccggagcgagatttccatatccttcccaacttaaagactaagactgtcatgaaaaagacgaaaattgtttgtactatcggcccgaaaaccgaatctgaagagatgctgagcaaaatgctggatgccggcatgaacgtgatgcgtctgaacttctcccacggtgactacgcagagcacggccagcgcatccagaacttgcgcaacgtgatgagcaagaccggtaaaaaagcggccatcctgctggataccaaaggtccagaaatccgtaccatcaagctggaaggcggtaacgacgtctctctgaaagcgggccagaccttcaccttcaccaccgacaaatccgttatcggcaacagcgaaatcgttgcagtgacctacgaaggcttcaccagcgatctgtccgttggtaacaccgtgctggtcgacgatggcctgatcggtatggaagtcaccgctatcgaaggcaacaaagttatctgtaaagtgctgaacaacggcgacctgggcgaaaacaaaggcgttaacctgccgggcgtctccatcgcgctgccagccctggctgaaaaagacaaacaggacctgatcttcggctgcgagcaaggcgttgacttcgtcgcggcctccttcatccgtaagcgttccgacgtggttgaaatccgtgagcacctgaaagcacacggcggcgagaagatccagatcatctccaaaatcgaaaaccaggaaggcctgaacaacttcgacgaaatcctcgaagcgtctgacggcatcatggttgcacgtggtgacctgggcgttgaaatcccggttgaagaagtgatcttcgcgcagaagatgatgatcgagaagtgtgtgcgcgcgcgtaaagtggttatcaccgccacgcagatgctggactccatgatcaaaaacccacgcccaacccgcgctgaagcaggcgacgtggcaaacgccattctcgacggtactgacgcagtaatgctgtccggtgaatccgcgaaaggtaaatacccgctggaagcggtcggcatcatggcgaccatctgtgaacgtactgaccgcgtgatgaccagccgtctggacttcaacaacgacagccgcaagctgcgtatcaccgaagcagtatgccgcggtgcggtagaaactgctgaaaaactggaagcaccactgattgtggttgctactcagggcggtaaatctgcgcgcgccgtgcgtaaatacttcccggatgcgaccatcctggccctgaccaccaacgaaaccaccgctcgtcagctggtgttgagcaaaggcgtcgttgcgcacctggttaaagagatcgcctctactgacgatttctacattcagggtaaagcactggctctggaaagcggtctggcacagaaaggcgacgttgtggtcatggtttctggcgccctggtaccaagcggcaccaccaataccgcatctgttcacgtgctgtaataattcccgaacgaattaatttggataaaaagcgcccgccgggcgcttttttttattcctggcattagccaaagtcattcaaaatgcaaatcgggtttttctatttaattgcgaattatctaagatgaatccgatgataaatgcctttttttccttagatttttgcccgaaaagggctgattcggtgcttctttgagcgaacgatcaaaaataggtgtattcccatcaaaaaaatattctcaacccaaaaaactttgtgtaatacttgtaacgctacatggagattaactcaatctagagggtattaataatgaatcgtactaaactggtactgggcgcggtaatcctgggttctactctgctggctggttgctccagcaacgctaaaatcgatcagctgtcttctgacgttcagactctgaacgctaaagttgaccagctgagcaacgacgtgaacgcaatgcgttccgacgttcaggctgctaaagacgacgcagctcgcgctaaccagcgtctggacaaccaggctactaaataccgtaagtaatagtacctgttaataaaatggcgcacattgtgcgccattttttttgcctgcgtcaaacgcctattgcgtcaccctctccccttcatcttccgccaccgcagcagacacccggctgttctgcaccgacaacacgctattgctggctgacgggccgctaccggacgacacgataaccgggatcccggcacgacgtgacagcgctttatcaatcagcgccttatcgcttcctgcctgagaaacaaaggccgcaaagtcggcagaatgggtaatgggcgagacctgcggattttccccttctacctgcgccagcggacggtggacctcaatatagcgtttaccatccggctccacggaaaacttcacgggttcattgataatctgcacccgcgtgcccacccgcacctgttcgaacagcgccttaatgtccggggcgttcatccgcatacagccagagctgacacgcaggccaacgctgtccggcgcgctggtgccatgaatgagatattccccattccccacgcctaaacgcagtgcgaagcgtcctagcgggttatttggcccggcagggaccaccggaggcagtttaatgccctgctccagagagcgtgctctgatgcccggcgtgggtgtccaggtcggattagggatcttctggctcacccgcgtggtcgtcaccggcgtttccagccccagttgcccaatacccagaggataaacctgaacaatattttgccccggcgggaagtagtagagccgaagctcagcgagattcaccacgattccctcgcggggcgtatccggcaacagcatttgcgacggaatggttatcacggttcccggcgcagggtttaccggcgcaatggtattgttggtttccaggatcacctgcgccgccgtattaaaccggcgggcgatggtctgcagcttattatccccttcctgtatcgtgtaggtttgattttgcccaatcagacgactgcctgcgggcggcaacggatagtccatcgcgcgggccgaatgaagggcgccgagcgaactgaggagtaatagagtaatgagagacgcgcgcttcatgctgagattccttattcactgacagaacgccagaaagctgaaaaaccagcgaggcgggaaccacctcgcgaaacagaatgaatgctgttctgtaagtctagctaaggattgcagctttggcgcgaatggcgcgaatcatcgcttccagtccctgtgaacgggacggggtgaggtgttgggttaaggccattttttcaaaccacggacgaacatcgaacgcgacgatatcctgcgccgacatctgctggtaaaggctaaagacgaccgcaataagcccttttacaatggcggcatcgctgtcgccgcgcaattcgatcgtgccgtcatccgactgcgccatcacaatccacacctggctctggcagccctgaatactgttctccgggctgtgcgcctcttcaccgagcggcggcaaacgctgtcccagctcgatgatatagagatacttctcttcccagtttgcgcaacgcgagaagttacgcagtaatttatctttgtccggcagctctgccatcttttgcctctccgttagcccagcagctggtgaatgcgcttcagccccgccaccagcctgtcgacctcttccgtcgtgttgtacatcaccagcgatgcgcggcacattgccggtacctggtaaaacgccatcagcggcatggcgcagtggtgcccggtgcggacagccacgccgtagttatcaaggaagctgcccacgtcataggcgtggtgtttcccaaggttaaacgcgattaccccttgccgatcggcaggcccgtagagggttaaatccggcacgctggcaagctctgcaagcgcgtagtgcatcagcagctgttcatactcctgaatgctttcaaggccgatcgcggaaacgtaggaaaccgcggcccccagcccgataatgcccccggtgttgggcgtgcccgcctcaaaacgccacggggcgcgcgcgtaggttgtgccttccgtcaggctgacggtggcgatcatcgacccgcccccttcccacggcggcatcgcctgcaggatctcttctttcacatacagcacgccaatcccggtcggcccgtagagcttgtggcctgaaaagacgtagaaatcacagtccagcgcctggacgtcaaccgcgtggtgcatcaccgcctgcgcgccgtcaatcaggacctttgcgcccgcctgatgggccttctcgacgatctctgccaccgggttttctgtccccagcacgttggagacctgggtaaccgccaccagccgcgtgcggtcgtccagcaagaggtcaagctgctcaagctgaagcgtcccgtcagcgtttagcgggatcacccgcagctgcgcccctacgcgctcgcagagcatctgccacggcacgatattggcgtggtgctccatctgggtgatgatgatgttatcccccgcgtggacctgcgcgttgccccagctgttagcgacaaggttgatcccttcggtggtcccgcgaacaaagaccagttcttccggcgagcgggcgttaagaaaagcggcaagctgcgtacgcacgttttccatccgctgggtcgcctcggcgctcagggtatggataccgcgatgtacggcggcatagccgtggcgatagaactcggcttcggcatccaccacctgattcggcttctgcgcgctggccgcgctgtccaggtaggccagcggcagaccgtttacttcacgggtcagaaccgggaaatctgcccgtactttttcgacgggaaaactcatgcttcgcctccaggcaggcgctgaccgatccgatccagcacctgtagttttaactgaccatcgtgcagcgcttccgtcagttcggcggcaaacgcgtagataatcattttctgcgccgcctgctggtcgatgccgcgcgagcgcaggtagaacatctgctcgtcgtcgattcgcccgaccgtcgcaccgtggctgcatttcacgtcgtcggcgtagatctccagctgcggcttggtgtccacctctgccaggcgacctaacagcagattgttgttggtcatctgcccgtcggttttaatggcgtgctgcgccacgttaatcaggccgttaaacaccgcacgccctttatcactcacgatggttttatgcagctggcggctgttgcagtagcctttgttgtgctcaagccaggtgcgcgtatcgcatacctctgatttaaccggcatcgccaggctgttgatgcgcagcgtggtgttttccccgttaagctgcgtgctggtgttgtggcgcagcactgccccgccgagcaggaagctatggctgtacgcggcggcatcctggcccaggacaatgtcgttatgggcaaagtggtggttctgcgcattctcaaacgccagtttgatgtggtgtagctgggcattggccgccacgttcatggtcagacgcgacccggtaaagtgacgcgtctcattgaggctgacgtaatgttcgatgaccgtggcctccgcgccctccgccagctcaagatggtgacgatagtgcgcggtattgatttcgtcgccgtccagaccctgagtgatatgcatcagcagcagcggctttgacggacgctggttacgcttcacggcgatatgcgtcacgctgcgggccaggctttcggtcaggtgcagaaagacctcaggctgaaccggggcgctcaggcgctggcgatcgtcgtttatctcaatctcaaagccgctctcctggagcgtgtcgctcagttctggacggaactggccatcgacaaacaccaggcgcacggcatcgacacgcaaggccaacgcgtcgcgctgcgctggggtgagatccgccagacgggttacaaactcggcgttcagcaagccatcaagcggggtgtacttccagttctcatgcttacgcgtcggcaggccaagacgcagcatctgctgcagatgctgctgcgcttgctcagagcgcgtgccgccctgggcctcaaacagccggtgccactgctggagcgcattactgctgttcggtaagccagccataaccctgctcctccagttgtttaaccagcgtgaaatcaccggatttcacaatgcgtccctggtaaagcacgtggacgtaatccggcttgatgtagtccagaatgcgctggtagtgggtgacgataataaacgagcgcttgccgtcgcgcagggcgttcaccccgtcagcgacaatcttcagggcgtcgatatccagaccggagtcggtctcatccagaatgcacagctcgggctccagcaccgccatctgcagaatgtcgttacgctttttctcgccgccggaaaaaccgacgttcaccgagcgggtgagcaaatcttccggcattttcagcagcttgattttctcttccattaaatcctggaagtcgaagcggtcgagcgcctccagcccccggtatttccgcaccgcgttgagcgcggtttgcaggaagaactggttgctgacgccggggatttctaccggatactggaaggccataaagatgccctcgcccgcgcggtcttccggcgacatctccagcagatctttgccgttaaattcgaccgagccgtgggtcacctcataatcttcgcgtcctgccagcgtcgcagaaagcgtacttttcccggaaccgttcggccccatgatggcgtggacttcgcccggcttgacgtcaaaattgaggccacgcaggatggctttatcttctacgctgacctgtaaatctttaatgcttaacatgtgctttccttaaccgacgctgtgttcaagactgatggcgaggagtttctgggcttcaacggcaaattccagcggcagttccgagaacacgtccttacagaagccgtttacaatcatcgagatggcatcctcttcgctgatcccgcgctgcaggcagtagaagagctgatcttccccaatccgtgacgtggtcgcctcgtgctccagctgggccgtgttattacggcattcgacgtatgggaaggtatgcgccccgcagtcagcgccaatcagcatcgagtcacactgggtgaagtttcgcgcattggtcgccgtcggcatgattttcaccagcccgcgatagctgttctggctgtgtccggcggagatacctttcgagataatggtcgatttggtgtttttaccaatgtggatcatcttggtgccggtatccgcctgctgatgaccgctggtgagcgccaccgagtaaaactcgccgatggagttatccccgcgcaggatgcagctcgggtatttccaggtgatggccgagccggtttcggactgggtccacgacatcttgctgttttcgccttcgcacagcgcacgcttggtcacgaagttcaggatgccgccggtattgccgtcgcccgggaaccagttttgcaccgtcgagtatttcacctcggcgtctttatggatgatgacctccaccaccgccgcgtgcagctgatagctgtcgcggaccggggcggaacacccttcgatatagctgacgtagctgccttcatccgcgaccagaatggtacgttcgaactggccggttttttcggcattaatgcggaaataggtggaaagctccatcggacagcgcacgcctttcggcacgtaaataaaggtgccgtccgaggccaccgccgcgttaagcgccgcaaagaagttgtcgttagagggcaccacggttccgatgtactttttcaccagttcaggatgatcgtgaatcgcttcgccgaaggagcagaaaatgatcccctgctctgccagcttctcgcggtaggtggtggccaccgagaccgagtcaaagatagcgtccaccgccacctctttcccttcgcgcaccggtacgcccagctggttgaaggcttcttctacctctttgctgaggaaactgttctccgcgccggtttgctgcaccgcgccgggctgcgaggcgcaggtgtcatcgcagctgccgcaggagggcgcggagtagtagctgtagtcctgatagttcagcttgtcataatgcgctttcagccagtgcggctcttccatctccagccaggcgcggtaggcgctcaggcgaaactccagcatccactcgggctcgttacgtttcgccgagatcgcccgcacgacatcttcattgatgccttttgccagctcatcggtctgcagctgggtgaagaacccctctttatagttgaggtgcccgccgctccaggtatttacttcactcgttgcttcagtattacgagacatagttccgcctataccccaaagctttcgccgcagccgcattcgttctgggctttcgggttatgaaatttgaataactggtttaagccttcgcggacgtagtccacttcggtgccgtcgataaagggcatggcctgcagcgcgacgtacagttttgcgccgtcggtctcgaacaccaggtcatctttctcgggttcggtgacggtatcaagcacgtaaccgaaacctgcgcagccggtctgtttgacacctaaacgcacgccgaggatctcgggctttttcgccaccagctcgtgaatatgtgccgccgccgctggcgtgagcgttaacccgcgccaggcgaaatcggcaggattaaaggtttctgaatgcagttccataggtccacctcatctgataagccatcagggcataacaccatgttagtgataacgattatcacttcaaccctctgtcagcaggggcattcggctaaaccgccctttttgcctacttttattaagcatagaccctgtggcaggatgcaggcaggatggatttaattgttcaatgcattgattaataatgcattttgttgtggcatttgggcaggagaggagaaacgtaaaatatgcattggaaatgcctatttttgagatagcttttgcgtggaaagtgacaaaaataaaaaaggccctcaaggcctcttacacttaatgatgaaatgagacagcaaacccctgttcacgccagtggtcgagctgttcctgctgtcgaggcgttggcgatttccccgtccagacgaagattttttgccccgggaacagttcaggacgcggcgaatcaatcggttctgccaggacgtcgatgtgccagcccttctgcgctaagcgcgcggcttcgagccacagatgggtgcggtcatcgcactcccagccgatcaggagagcgtctttaccggctttcttacgggactccgccaggcttgcaatcgcgaattcaatcaggactccgtctaacaggctcgccatgtgtcgcacggtattttggtcctggttcatccgctgccggacgggagaaatgatattgtcaatcagggaatctatcgggtgatcgcggcggaactcaccaattttggcgcgcagctttgccgggctggcgtagcgcagaacggtcatcatctcttcctggaacgagacccagttgccctgagtcaacacttccttgttttccagcaaggcttttactttcccgaccgaaacgccgctcttcatcaggcgtttgatctcttctatacgcaggatatcttcatcgtcaaactgacgatggcccccttcgctgcgctgcggcttcaacaatccataacggcgctgccaggcacgcagcgtaacggggttgataccgcatcgttcggccacttcgccgatactgtaataggccattaactccctcacgctcagaacttccatacctaactgcaccaaccttatcagattgtacaaaccatttgtataactaagaccgcattttgaacgggtgaatggcttaccaccccatccacctgttaatacattgttgtataaaatttaccgttcgtacagtaacgactgccagattgtgtacagctttatcacaattcgaactttttctccggccaggcaatggctggaataccgccgtgccgggggctggcaaaaagatgcccctggaactgggaaattcccgcagattccagccacatccactcttctgccttctctacccccaccgcgcagaactggatttcaagcgaggaacagcatttgatgatcgcctgaatgatggcctgtcgggggccacttttatacacgttcgcgaccagatcgcgattaattttaattctgtcaggctggaagtgggccagcagctgcagcccggcaaaaccggcaccaaagtgatcgatcgtcacgctgatacccgcgctttttaactgcctgaccgaatccgtgaattcatcaaaacgggaaatggcttcgctctcggtgaactccaccacgatttgctcaggtacaaacccgtttgcttcaatcgcggtgagcagaaaatccacggcgttgggaatgttaaccagcgtcataggcagcaggttcagggataacgtctggtcctgtaaccccagcgcgctggccatagagagcgccacctgcttgctttgcacatcagacgcgtacacttcctcatgcggaaggctggcgaaataagcccccggcgagtcgccggacggggggcggagaagcgcctcccaggagacaacctgctgcataaatggatcgactatcggctggaacgcgaagctgcaatccgcccctttcgcgaccacctcaggctgcgcggacaagcgcgtttcttcgcgaacgaattcccatgagtccgcaggcggcagttcaaaatagttcgctttttccgtggcctcgacaaaggtgcggaaaaactgcagagggcggtcgttatacgtcagctggtagcgtgtcgtccccttatcgagcacctgctgcagtacctcgtccctgtcgaagtggcgcaaatcaaaaagctccatacccacgttgccaaaacgccggacagggccgtgatcgcgcatcaactcgactacgttatggtggcgcgggtcgttgcagatctgctcatagatagccgaaacgtgctccaccggcccttccagcagttgaaaaaaatgtgtgccgttaaacagcaggatccccgtgacattggattgccgatttttacgatttgcagcagcgaccattgcttccagcgctttcactggaacgtcctcgcagatatgactgcggtaaatgatggttgtgagcatgctattcctgggaggttagggttttggccacaaaagacgtggggaatgttcatttatagcacattaattgcctgacaaataatttacatctcaaccatttacggcagttaatgagaccgtttgactcggctgtacaacttaccagcacctgcgctttttgtacaatatatcctgcactcaccccccatcacaacgccaacacaacgccaacacaacgcaatgaaaaataaatgatttataaaatatatcgtaaaaaatctaaaaatctgtacattttagatgtacagatttggaaattgtgtataccttaaatgtaacgttactgattacaaaattttacaggagcgaaacatgcagcagaaaggttacgtcgcagattccgcagcagcaatcgcacagtacttcgaaaaagccgcgcttccgacccaacaggaaacgctgggccaggtggttgttgaaattctcagcgacgggcgaaaccttaatcgcaaatcgctttgtacaaaattgctcagccgcctcgaaaaggccgatgggccggaagaggaagagcattaccacatgctgcttggtctgctcttcgaacggtaaggatatgaatcgcagtaacgcagaccgactgatagaccagcttatcggtgaagccgttctctgtcttctgaaagagcgggggccggtgacaacagaaggcttgctacagcgtctgcgggtcatgaaagaacatgaaaaggatccccagcggcgggagacacttgcgatggtgattgccgagatcggctcaaacagcatcgcctttacacgtcgcagaaccgcgcaaggacgaacaaaaagagagggatctctcaacgataaccgagacaatgtagtgccgttatttggaagtggaaaaccgtccgatcccaaaaaaatacattgactgcaatttaacagctacgctgagaacaaatgagacaaaatattcagcttcaacccgaatatcactctgcttttttagacagtgcgctggcggagtatttccgccatgcaggcgatcgttttgctgaagagtccgctattttttctactgcagtacgctgtgttctggcctccgaaggtcatctttccaataaagcgatcatcctctggctcattcagacgctggaatccaccaacgacgtggttcaggcggatgtgattcgtaagacgctggaaatcgtggtgggttacaccatggacgatctctgagttcctgctcgccgcgccccctaacgtgtcatcgtcaaaactgacgatcggcctgacgatgacacgcgccctcccccataacaccctgtaatacacgcaaagccaacctggcacgttttctgcttatctccgcatacgggactggtttttccagtcaactttgcttcatttcttaacaggtctgttattgatgaaaaagatcgccagcgtctgcccgtactgcggtgcaggctgtaaattgaaccttgtcgttgaaaataaccgtatcatccgtgccgaagcggcagagggggtcacaaaccagggcaccttatgtctgaaagggttttacggctgggacttcctcaacgacacccgtcttctcaccccccgccttacccagcccatgatccgctaccgcaaaggcgaagccttcacccccgttacctgggaagaggcgatccgctacaccgcccacaggctcagcagcattaaagcgcagcacgggccgcggtcgatcatgaccaccggctcctctcgcggcaccggcaatgaaaccaactacgtgatgcaaaagtttgcccgcgcggtgctgaacaccaacaacgtggactgctgcgcgcgcgtctgtcatggcccgtccgtggcgggtttacaggaaacgctcggcaacggcgcgatgagcaacgccattaacgatattgaaaactcaaaatgcctgctggtgtttggctataactgcgcggactcccaccctatcgttgcccgccgcgtgctgaaagcgcgtgaaaacggcgcaaaaattatcgtctgcgatccgcggcgtattgaaacggcgcgtattgccgaccaacatctgcagctgaaaaacggcagcaacatggcgctggtgaacgcctttggctatgtgctgctggaagaggagctgtacgacaaaagctacgtggcgcgctttacggaagggcttgaggcctaccggcaaacggtaaaagactatgcgcctgagaaggtcgaacatcttaccggcatccccgcccgtgatgtccgccaggcgatgcgcacctttgcggcggctccttccgctaccgtgatgtggggaatgggcgtgacccagtttggtcaggccgttgatgtggtcaaagggctgtccagcctggcgctgctgaccgggaatctcggtcgccccgccgtcggcgtcgggccggtgcgcggtcagaacaacgtccagggtgcctgcgatatgggcgtactgccgaatatgttccccggctatcaggatgtgaccgacccggcggtccggcagaagttcgctgatgcctggggaattgatgtcaataaaatggacgatcgcgtcgggacgcgcattaccgaagtgccgcatcttgcgctggaaggcaaggtcaaagcctattacatcatgggagaagatccgctccagacggaagccgatctcggcctggtgcgcagcggttttgaagcgctcgattttgttgtggttcaggacatctttatgaccaaaacggcagaggtggcggacgttctgcttccggctacctcatggggtgaacacggcggcgtctttacctgtgccgatcgcggcttccagcgttttggcaaagccattgaagccagcggcaacgtgaagcgcgactgggagatcatcagcctgctcgccaccgagatgggctatccgatgcattatgactccaaccagcagatctgggacgagatgcgcgagctgtgcccgctcttctacggcgtgacgtatgaaaaaatgggcgagatgggtcacgttcaatggccgtgcccgacgctggatcatcccggtacgccgtacctgtacaaagataatcagttcgataccccgagcggtaaagggcagctctttgccgcaccgtggcgcgcgccggcggaaatcccggatgcggatttcccgctggtgctctgtacggtccgcgaggtgggccactactcctgccgctccatgaccgggaactgcgccgcgctgcaaagcctggccgacgagccgggccgggtgcaaatgaaccctgccgatgcggacaagctgggcattaccgacggacagctggtctgggtgcgctcccgccgggggaaagtaatttctcgcgccagcatcagcgagcgcatcaacgccggggccgtttatatgacctatcagtggtggattggcgcctgcaacgagctaacccaggataacctcgatcccatctccaaaaccccggaaacgaagtactgcgcggtgcagctggaggccattgaggaccagcgctgggcagaagactatgccgcatcggcgtatcagtccatgaagtcgcggctgataagtgcggcgaacgtctgaggaaaatgccgggtgccgtaaccgccacccggcaatcgcgtacggtatcatgcaataacaagcaactcgcttacccgccccaaagagaagcgctataattagccaggttttttttaaggctgtcggcaaccatgtcccttccagaaaagtctcagcggggttctccccacgcgcaagcgcttatttcacacctgttacctgattgcacaacgcgacataccgcccgcggcgagcggctggacctgcaggtcaatggtcagggtatgtgctatttaattcttgaagggaccatcgccgtctacagaagaagcgataacatgatgctgtctacggcccgtagccctgctgttttcggcctcgctaacctcactgatatctattttagtgattatcttaagaccgtcagcccgtgcctgatcgggacgatcaccacagaaagggtgaatgccattattaaagagaaggcgctttggggactgctctctcaacagctcatgtatgtgtatagccgtctctataacaacgtaatgccgcagggcgcgccaacggcgtatgagatgattcgccagcagttaatgaagctgacggaagaagaggagggttatcggctcagcgtgacggcggaaaagtatatcagggagaaaacccacctctcccgcagcggcgtgatgcgcattctggcggatttgaaaaccggcggatttatcgaaatggaagaaggcaggcttatcaaaatcaacaagctccccgctaaatactgaatctcaggcacaaaaaaggccgcagttgcggccttttcaacattactctctcaatggacgtgaacgcccaaccgccaggcaaagtagatctcttctttcagctcattcgaagagagcgccagcaaatctgtaaattccagctcaagctgtttcagctttttcaggtactgcgccggggacagattgctcttatcgcgacgtaaatattcaattgccagctgtgttggggttatttcagtatccatgatgtcctcgcttatgtacaaaacctgaccagtatatcacaacccgctggctagtttttgaccaaaggcaaaacatctgaaaactttacacaaccgctgtcgtcaaccttgaagagcagcacaggcgatcctgctcgtcgagaatgtcaatctgccacacctggtggcgactaccggcgtgcagcgcgcggcacacgccgcgcacgcgcccgctgcgtaccgagcggatatgattagcattcacctcgagtccgaccaccttctgctccccttcggtacagagatatcccgccaccgagcccagggtttcggccagcacgacggacgccccgccgtgcaataaaccaaacggctggtgagtgcgacgatcgacaggcatggtggcctcaatgtcatcgtcgccaatgcgggtgaactggatatccagcagccccaccatattcccctcgcccatggcgttcagcgcctgcagcgtcacgacacgtttccagatcatccaattatctccagtaaagcctgcaatgggtggcgtacgccgttaccctctacccgtttcacctggctgcggcaggagtatcccgtcgccagacagcggtttcgcggcaagcgctgcatcgcctgatgccaggacagctcataaatgccgagcgagttggcgtggtttttcacttcgtgtccgtacgtgccggccatgccgcagcagcccacgctaacgctctccagcttcgcgccgaagcgggcaaagacggacgcccactgcgcgggggcgccaggcagcgcggtcacttccgtgcagtgtccgaacagataccacggctcaccgctgacgtcctgaaccgctttgtcttccagggccgtcggcagccactcgtgcaccagcatgacgtggaaatcaccgcgcttatcgcccagcgtctgcctgtattcatcgcggtagcacagcaccagcgccgggtcgacgccgaccatcggtatcccgagttgcgccacgcggtttaagaagtcagatgttttctgcgcggtcttcgcaaagcgcgtcaggaagcctttaatgtgctgcgccttgccgttgggcgagaacggcagcacaaccggctggtagcccagcttttccgagaggcggatgaagtccgcaaccacctgggcatcgtagtagctggtaaacggatcctgcaccaccagcaccaccttcgctttttgctcaggcgtgagcgcctccagctgctccagggtcatgttcgccgaacgatgcccgacgagctggcgctgcagagacggcaccgacagcagcggcagatcgaccatgccgatatgcttttcggaaagcttgcgcaccagcggctggttgataaagaagttgaaggtcttcggcgcgcgcgccatcagcggcgcatagctctctaccgtcgccaccagatggtcgcgcaccggacgcagatagcgcgtgtggtaaagctgcaggaagcgcgagcggaattcagggacgtcgattttaatcgggcactgggtagagcaggctttacaggccagacagccggacatcgcctctttcacctcatgggagaaatcatactcgcccttgttggcatgccagctgttgcgggtgcgctcaatcagcgagcgcaggctggcccgtttttccggcagctcctgctccagcttgaggggatcgacgccacggtcggccagcagacgcagccactcgcgcaccagcgtcgccctccctttcggcgaatgaatgcggttgctggtgattttcatcgacgggcacatcgggcttttcacgtcaaagttaaagcacaggccgttgccgttgcactccatcgcgccgcgccaggaggagcgcaccgaaatcgggatctgtctgtcgtaggtgccgcgcttgacggcatccacctgcagcatgggggcgtccacgccttctggcgggcagattttacccgggttgaggcggttatgcgggtcgaaagcggctttcaccttgcgcagctccgcatagagctgttcgccgaagaacgccgggctgtattctgcgcggaaccctttcccgtgctcgccccaaagcagaccgccgtatttagcggttaaggccaccacgtcgtcggagatctgcttcatcaggatctcctgctgcgggtcgcacatatccagcgccggacgcacgtgcagcaccccggcatcgacgtggccaaacatgccgtagctcaggccgtggctgtccagcagggcgcgaaactcgacgatataatccgccagatgctcaggcggcacgcaggtatcttcggcaaaaggaatgggcttagcggcccctttcgcattgccgagcagacccacggcttttttacgcatcgcatagatacgctcaatcccggccagatcgttacagagctgccagccgatcacgccgccttcgccctgcgaaatcagctcatccagtcgctggcagagcgtggtgacctggctctcaatcagctccacgtcgtcgccagcaaattccacgatgttaagaccgagcatctctttgtccggcacgtcggtaatgagatcgctgacggagtgccagacaatatcttcccgggccaggttgagcactttggagtcgaccgtctcaaccgacagcgctttcgcctccaccataaacggcgcattgcgcaacgcggagtcgaaagaatcatatttgacgttcaccagacgacgcaccttcggcaggcgggtgatatccagccgcgcctcggtgataaacgccagcgtcccttcggaaccggtgagcacgcgggttaaatcgaactgggtcaggtcgtcgttgaagacgtggcgcaggtcgtagcccgttaagaagcggttcagtttggggaatttgtcgagaataagctggcggttgtcgcggcagcgctccagcacggtacggtagatgcgtccgctggcggtgttatctttacccagcgtttccgccagttcgaccggcatcggctgcgtatcgagaatatcgccgcccagcagaacgacccgcacgcccagcacatgatcggaggttttgccgtagaccagcgagccctgaccggaggcatccgtgttgatcatcccgccgagggtcgcgcggttactggtggaaagttccggggcaaaaaagtagccgtaaggcttgaggtactggttaagctgatctttgataacgcccgcttcgacccgcacccacccctcttccgggttgatctcaatgatgcggttcatatagcgcgacatatcaacaataatgccctggttcagcgcctgaccgttggtcccggtgccgccgccgcgcggcgtaaagaccagcgaggcaaagcgctcctgcgtggcgagccgggcaatcagcgccacgtcggccgtagaacgagggaaaacgacggcatcgggaagaagctggtaaatactgttatcggttgccatcgtcagcctgtcggcatagttcgtggcggtatcacctgtaaaaccctgttgctccagtgcctgcaaaaaattaagcaccagctgaacgacgccgggtgcctgggaaatctgtgggatcatgactgtcgaccctaattagagtaatgtgaaatcgtttgcgttgtgtccggaaagttttatcacatttttttcttatgtgcttcgtagaattacgggcaaaatccgcctgtcaaaaaccgctgagatcattaatgattaaagagatgcggttttccgttcccgccagccgcgctggcgttcttttaaggaaagtttcatttatggtcaatcttcgccagcccagggatgttgcgcaaattttgctgtcggtgctgttcctggccctcatgatcattgcgtgtctgtggattgttcaaccctttattcttggcttcgcctgggccgcgaccgttgtcgttgccacatggcctctgctgctgcgcttgcagaagctgctgttcggccgccgcgggttagcggtgctggtcatgacgctgctgctgttcctgctgtttattattcccattgcgctgctggtaaacagtctcgtcgactccagcggcccggtgatccgcgccgtgaccagcggcgatctcacgctgccggatctcgcctggctgaacagcattccggtcgtgggcgccaagctctacagcggctggcacagcctgctggagatgggcggcagcgcgctgatggcaaaagtgcgcccatatattggcaccaccaccacctggtttgtgggtcaggcggcgcatattggccgctttatgatgcactgtaccctgatgctgctcttcagcgccctgctttactggcgcggtgagcaggtggctttgggcgttcgtcactttgccacccgcctggcgggcaaacgcggtgacgcggcggtactgctggcagcgcaggccgtacgcgcggtggcgctgggcgtggtggtcaccgcgctggtgcaggcggtgctgggcggtattggtctggcgatttccggcgtaccgtatgccacgatattcaccgttgtcatgctgatgacctgtcttgcacaactggggccgctgctggtgctggtgccctgcattatctggctctactggacgggagataccacgtggggaacggtgctgctggtctggagctgcgtggtcggcaccatggataacgtcattcgcccgattctcatccgcatgggcgcagacctgccgctgatcctgatcctctccggggtgattggcggcttgattgccttcggcatgattggcctgtttatcggcccggtgctgctcgccgttacctggcgtctgttctccgcctgggtgcatgaaattccgccgccgggaaccgacccggacgtgattttgagcgaactggaagagctggaagagaagaacacgcattaagtttttgccgggtggcgctaacgcttacccggcctacattcccccacccaatactttaacgctgctaaagtatttattcgttgcacactggtcagacccgcaatttctgcactcaatctgctcataacctcaagaaatctttatatctctttaactattgagacgaatccgatcgacgctaaaagcggacatgcctactattagcacacggttataaatcaacaccttgatttataagcatggaaatcccctgagtgaaacaacgaattgctgtgtgtagtctttgcccatctcccacgatgggcttttttttatcctgactacgcgcgcgtaacctcacaggtactgagcatccgccactcggcaggcagcacccgcgtttccccggtcacattgaccgtcaccacctggcggatatccgccgacgatgcgccaacctgcagttcaaactcgcccggctcaacgatgcgtttaccgtcgcgacgggtgaagttgaacatctccaccggcagcgtaaagctgagcgtggcggtttcgcccggcgagagcgtgacgcgctggaaggccttcagctcctggagcggccgaacctgggtggcgaccttatccctgacgtaaacctgcaccacctcgctgccgctgcgctctccggtattggtgatatccacgctcagcgtcacctcaccgtcgaccggcacgctgctttcagcgacgcgggcagcattccagcgaaacgtcgtccagccgaggccgaagccaaacggataacgtgaaccgaagtggaacgcaaacggcgtgccgccgcttttgagcttgtgattgtagtaatacggcatggccccggcgcttttcggcacgctcaccaccagacgcccctgcggctctgcacgtcccgttaacacgtccgcaatggcccggcccccttcctgccccggtgcccaggccacgatcagcgcggccaccttgtcctccaggccctgaagagtgtaaggacgcccgccggtcatcacgacaatcaccggtttgcccgtcgccaccagcgcctccagcagctgctgctgaacacccggcagattcagggaatcggtgtcggaaccttcccccacggtaccgctctggaacagcccggcgagatcgcccacgcaggccaccaccacgtcactctcctgcgcggcattgaccgcctcggggataagggcggtgctttgcgacacgggagactgctgcattggtttaccgccgctgtcgcccgggaagaccggcgcacccgccatccgtttctcgatgatgtgacaccctttggcgtaacggacctgagacgcgccgaggtagtgctccagcgccgcgcgcggggtcgtcacctgcgaggtctcctcaaccatatcgctgatgatcagatgcaccggaaagctgtagccgctgagcaatgccagcggatcgtctgccgtcggccccaccagcgccacgcgggatttaccattcagcggcagaatgccgttgttttccagcagcgtgaccgattttgtcgccacctcccgcgcgacctggcgggtcgtctcattttgcagaacgatgccgttttcatcggcatacgggttctcaaacaggccgaggcggaatttttcggtcagcacacggcccacaatctcatccactttcgccatagagatcagcccgcgctcaacggcgtctgccagatgccgcgcgcagtcatctttcggcagctcaacgtccagcccggcgttgaaggccagcgcggcggattcggccgcatcgtgggaaatgccgtgatgctggtgcagcaggctgacgccgccgtaatccgcgacagtaatgccgtcgaagccccactgttcgcgcaggacggtggtcagcaggaagctgtcgctgtgccccggctggttatcgatatcgtggtaggcgggcatgaccgaaccggcgtttgccagcttcaccgccatttcaaacggcagcaggaaggtgtcgttcagctcgctaaagcccagatgtaccggcgcatggttgcgcgctccttcgctgaacgagtggcccacgtagtgcttgagcgtcgccagcaggtcgcgcttatcgccctgtaagcctttcacgtaggcggtcgccatcacccccaccagccagggatcttccccgaaggtctcttcggttcgcccccagcgcacgtcgcgggaaacgtccagcaccggcgccagcccctgctggcagccgacggaacgcgcctctttaccaatctgctctgccgcgcgctgtaccagttcagggtcccaggtcgaaccgtagttcagcgacgacgggaacagcgtggcgtctttgcacagcagccccaccaggcactcttcatggaacagggccggaatgccgagtcgcgtctcctccatcatcaagcgctgcaggcggttggcggcgcgcacgccggttttcacgtcaacgatatgggtacccagcggacgggtgatctgcccgacgcccagcttcagccgttcgctcagtgcagcttgctcgctcacgccggcgaattcgtcgctgaggtcgctgcgctcgcggtggttaccgttttcatcgaggatcagccagtacgcatgcatctgggcgaacttctcttccggggtcatacgcgccagtaaatcggcgacgcgctcgtgcacgggacgtcccgcgtccttatagatagctgtcatgttttactcctgtagtgcggaaggggttgccgggctgagctgccctgcttcgggtctcacctcacgcttgctggccagctcccgggcgatggaatccaccagccgactgttaagcttgtagattgaaagcagtgcgaccatgcagaggaacagcgcgcaagggataagggtgaacagggcgttgatcgtagagagcacgtgcggcgcctgggctgcctgtcccggggcgtaatccaccatgccaagcacccagccgacgaccgccccacccagcgccagcccaaatttgatggcaaacagcgcggtagagaaaaccagcccgtccaggcggcggccgctgcgatgctcttcgtagtcgaccacatcggagaacatggtccactgcagcggcgtggtgaggttttgcacaaagctaaagacaatgttgaggccaaaaatcagccacacctgcgaaggcggcaggaagaaaatcagcgccccgaaaatgacgaaggaaataatggtccactggtaggcgcgcacgcggtcaaatttccccagcagccgttcagataatagtgcgccgcttaaggaggcgaccattccggaaacaataaaggcaaaaaccagctccgggcgcaacagcacgtagttcacgtaatacatggtggcggaaccgcgcgttaccaccgccgttaacagcaaaatattaaacaggaacacaatgcgccattggctgtttccggccagcagttttaaatcggtgagcatcgagccggaagtatcactgcgcggagaataacgctcgcgggtcatcaggaagcagcagaaaaacagcacaatgcccagcagccccatcaggctcatggcgtagaaatagcctttctgcacgttgccctggcctaacagtgagaccagcggcagggcaatcaccgtcacaatcaacccgccgataaacgacaggccaaagcgccacgactgcagggagtgacgctcgcgcggatccagcgtcagcgcgccgggcatggcgcagtaaggcacgttaatggcggagtaaatcaggcttaagatcgcgtaggtcaggcaggcataaacgattttcgccgtcggccccacgtccggtacatagaaggtgatgaggcagcttacgccaaacggaatggcgaaccacagcagccagggacggaaacggccgtggcgcgtttgagtgcgatccaccagcgcgccaatgcacgggtcgacaaacgcatcgaccacgcgcaccactaaaaacatggtgcccatgattgcggcgggcagcccaaaaacgtccgtatagaaataggcgagaaataacgttgccgtttgccagaccagcgcgctggccatatcacctaagccataacctattttatctttggtacgcaatacagaggagagtgtcattgttatttgcctttttatcaggttaaaacgtatttcaaccagttgcgcatcatctgaagggaaatgcgcatgtaaggctcaagtattagcaacggtttgcgcgctaacaattgtctaaattgacaggcaaattatgatatttagttttttactttatttgtgatggggagcatattcgggcggaaataaaaaaggcgaggaataatatccccgccttttcgggtcagcgtggcgttacttgttcagttccgccaggctcagccaggtttgcaccacggtgtccgggttcagggacaggctatcgatcccctcctccatgagccaggcggcaaagtcttcatggtcggatggcccctgaccacaaatcccgacgtatttgccctgcttcttcgccgcgcggatggacagggagagcaatgctttgaccgcctcgttgcgctcgtcgaacagctcggagaccacgccggagtcgcggtccagacccagcgtcagctgcgtcatgtcgttcgagccgatagagaagccgtcgaagtgctccaggaactgctcggccagcagggcgttggacgggatttcgcacatcatgatgatcttcagcccgttctcgccgcgcttcagcccctgacgcgccagctcgtccaccaccgctttcgcctggtccacggtacgcacgaacgggatcatgatttcgacgttggtcagccccatgtcgttgcgcacgcgcttcaccgcctcacactccagcgcgaagcagtcgcggaagctgtcggacacgtagcgtccggccccgcggaagcccagcatcgggttctcttcttccggctcgtagcgctcgccgccgaccaggttggcgtattcgttagacttaaagtcagacaggcgcacaatcacgcgtttcggatagaaagcggcacccagcgtcgcgatcccttcggtcagacggccgacgtagaactctttcggcgagtcgtagcctttcatcatctcgcggatttcgttctgcagcttcggctcctggtcgtcaaactccagcagcgcacgcgggtgaacgccgatcatacggttgatgataaattccaggcgcgccaggcctacgccttcgttcggcaggcaggcgaagtcgaacgcgcggtccgggttgccgacgttcatcatgatcttcagcggcaggtccggcatggtatccacgctggagctcttcacgctgaagtcgaggatatcggcatacacgtagccggtatcgccttcggcacaggagacggtcacattctgtccgtccttcatgcgctcggtagcatcaccgcagccgacaaccgcaggaatccccagctcgcgggcaatgatcgccgcgtggcaggtacgaccgccgcggttggtaacgatagccgccgctttcttcatgatcggttcccagtccgggtcggtcatgtcggtcaccagcacgtcgccgggctcaatgcggttcatctcgctgatgtcgtggatcaccttcaccggaccggcaccgatgcggtgaccgatagcacggccttccgccacgattttgccctgggcgtgcagcgtgtaacgctccatcacctgaccgcgtgagcgaacggtttccgggcgcgcctgcacgataaacagcttgccggtgttcccgtctttcgcccattcgatatccatcggacggccgtagtgtttttcgatctgcaccgcctgcttcgccagctcctgcacttcggcgtcggtcagggagaagcggtcgcgctgctcctgcggtacatcttcaattttaacctgcttgccatgctcctgggtcggggcatagatcatgcggatttttttcgagcccatggtgcggcgcaccaccgccggacggccagcggccagcgtaggcttgtgaacgtagaattcgtcagggtttaccgcaccctgcacaaccatctcacccagaccccacgcggaggtgatgaacaccacctggtcgaagccggattcggtatcaatggagaacatcacgccggatgagcccacgtccgagcgcaccatgcgctgtacgccagcggagagcgccacgccgcgatggtcgtagccctggtgcacgcgataggagatggcgcggtcgttgaacagggaagcaaacacgtgcttcaccgccaccagcaccgcatcgtaaccctggacgttcaggaaggtttcctgctgcccggcaaacgaggcgtccggcatgtcttctgcggtggctgaagagcgcacggcaaaggaggcctgcgcgtcgtcagcggagagctggttgtacgcgtcgtgaatggctttttccagttccggctggaaaggtgtgtcgatgatccactggcggatctgcgccccggctttggcaagctcggtcacgtcatcaatatccgttttatccagcaggtcgtaaatgcgctggttaacaccgctctggtctaaaaacaggttaaaggcatcggcggtggtggcaaacccgttcggtacggagacacccatacccgacaggtttgtaatcatttcacccagggaggcatttttgcccccaactctgtctacatcattcatgccgagttggttataccaaagcaccagcggtgacgagccattgttggacatcgaaacaatccttttgtgatatttgatcggagtaagaaacacctgactacgtatttatactggcataattatttccgctaaaaaaacggtgaatcgtgtaagcaatttaaattttcaacttttcggatactttcccatcaacgattaacccgatgattcctctatattcagccagaaaccccaaaaataaagtcgctatttgaaaaatgaaatccacttttcaggaaaatcaaaaacagcgtttcattcataattaggataagttctttgctgtgtaaattacttttttaatttatgctttcagacaattacgtctgatattcagggtgggtaaaatggatagtgctgtcgatcgtcacgttttttatatttctgatggtacggcgatcaccgccgaggtgctgggccacgcggtgatgtcgcagtttcccgtatcgatcaacagcatcacgctgccgtttgtcgaaaatgagagccgcgccaaagcggtgaaggaccagatcgacgccatttaccagcagaccggcgtccgcccgctggtgttctactccattgtgatccccgagattcgcgccatcattctgcagagtgaaggcttctgccaggatatcgtgcaggcgctggtggctccgctgcagagcgagttgaagctcgacccaacgcctatcgcccaccgtacccacgggcttaaccccggcaacctgaccaagtacgatgcccgtatcgccgccattgactataccctcgcgcacgacgacggcatctcgctgcgtaatctcgaccaggcgcaggtgatcctgcttggcgtgtcgcgctgcggcaaaacgccgaccagcctctacctggcgatgcagttcggcattcgcgccgccaactacccgttcatcgctgacgatatggataacctggtgctgcccgccgccctgaagccgctgcagcacaagctgttcgggctgaccattaatccggagcgccttgccgccatccgcgaagagcgccgcgagaacagccgctacgcctccatgcgccagtgccggatggaggtctccgaagtggaagccctgtaccgcaaaaatcagatcccgtggctgaacagcaccaactactctgtggaagaaattgcaaccaaaattctcgacatcatggggcttaatcgccgcatgtactaatatgctagtgcattagctcagaatcaggtatcatcatcggcaaccacggggctatgtcgccccgaacttgaaatcagcagggattggtttaaggtgatgcccatcacttcccggtagtctgccgatgaagcaaaaattttctgagacattccatgaataaaaccgatgaactccgcactgcgcgcattgacagcctggtcacgccggctgaactggcccagcggcatcctgtttccgcggccgttgcggaacacgtgacggcctcccgccgccgcattgaaaaaatacttaatggtgaagacaagcgtcttctggtggtgattggtccctgctccatccacgatctggatgccgcgatggattatgcaaaacggcttcagggcctgcgggataggtatcagcaccgccttgagattgtgatgcgaacctactttgaaaaaccgcggaccgtggtgggctggaaaggactgatttccgaccctgacctcaacggcagctatcgcgtgaaccacggcatcgagctggcgcggaagctgcttttgcaggtcaacgagctgggcgtgccgaccgccaccgagtttctcgatatggtgaccgggcagtttatcgccgatctgatcagctggggcgcgattggcgcacgcaccaccgagagccaaatccaccgcgagatggcctccgccctctcctgtccggtcggctttaaaaacgggaccgacggcaatacccgtattgcggttgatgccatccgcgcggcccgtgccagccacatgttcctgtcgccggacaagagcggtcatatgaccatctaccagaccagcggtaacccgtacgggcatatcattatgcgcggcgggaagaagcccaattatcatgcacaagatattgcggcggcctgtgaaacgctggcggaattcgacctgccggaacatctggtggtggacttcagccacggcaactgccagaagcagcatcgccgccagctggacgtctgcgatgagatctgccagcagatccgcagcggttcaaccgccgttgcagggattatggcggagagctttatcaaagaaggcgcgcagaaaatcgttgctggccagcagatggtgtacggccagtcgatcaccgacccgtgcctgagctgggaagacagcgagctgctgctggagaagctggctgcagccgtggacacgcgcttttaacatcctgccgggtggcgctgcgcttacccggcctacgattcttgccgttgtaagcccggtaaggcgaagccgccaccgggcttttgattgcacaatattgatcctctcacccttttttcacaaaaacgcttgccgtaaatttgcagtttattgacaatgattatcattgttacattgattgttatttataaacattatgtcacgtacggataacagcgcggcaacgccagcaaaaaaagacacagcaccagcccctaccgagcgtcggattgacagcaaaatcctgctcggcgatgcggggcgggtcattatcgagcatgacggccagcgctatctgctgcgccagacccatgccggaaaactgatcctcacaaaataaaccaaaaacttcgccagccacccaggtgatccccaggcagccagcgctttcgattctttatggagagttgctatgccacacctgccttccgcgtctttacgcccgtcacttctggcgctggcgattgtcagcaccctgccgggcgtcgcgtttgctgccgcagatgaaatgaccgtcaccgccacgggcaacgcccgcagcgcctttgaagcccccatgatggtgagcgtgattgatgccaccgccccggagaaacaaaccgccagctcggcggccgacctgctgcgtaacgttcccggcctgatgctggacggcaccgggcgcaccaacgggcaggacgtgaacctgcgcggctacgatcgtcgcggcgtgctggtgctggttgacggcgtgcgtcagggcaccgacaccggtcacctgaacagcacgttcctcgatccggcgctgattaagcgtatcgaagtggttcgcggcccgtcggccctgctgtacggcagcggcgcgctgggcggcgtgatttcctatgacaccgtcgatgcaaaagacctgctggaaacgggtaaaaacagcggttatcgtgtgtttggtacgggggcgacaggcgatcacagtcttggcatgggggccagcgcctatggccgcaccgacacgctggacggtctggtggcctggtccagccgagatcgcggtgatatccgccagagcgacggagcaaccgcccctaacgacgagtccatcaataacatgctggcgaaaggcagctggaaaatcgacccggcccagaccctgagcggcgccctgcgctactacaacaacgatgctcaggaaccaaaaaacccgcaaaccactggggcggacagcagtaacccgatgaccgatcgctccaccatccagcgtgacgcgcaggtgggctaccgcatcgccccggaaggtaacgactggctgaacgccgacgcgaaggtctactggtccgaagcgcgcattaatgcccagaatatcgacaacagcggtgagttccgcaagcaaaccaccaaaggcggcaaggtggaaaaccgcacccgcctgttcagcgacactttagcagcacatctgctgacctacggtggggaatactaccgtcaggagcagcatccgggcggcgcgaccaccggcttcccggaggcgaaaatcgacttcagctccggctggctgcaggatgaaatcaccctgcgcgatctgccggtcaccttgctgggcggtacgcgctatgacaactaccgcggcagcagcaatggctacgacgatgtggatgccgataaatggtcctcccgcgccgggttgaccgtcagcccgaccgactggctgatgctgtttggctcatacgcgcaggcgttccgcgcgcccactatgggcgagatgtacaacgacgccaaacacttctctattggccgcttctataccaactactgggtgccgaacccgaacctgcgcccggaaaccaacgaaacgcaggagtttgggttcggtctgcgctttgacgatctgctgcttgccaacgatgcgctggagtttaaagccagctatttcgataccaaagctaaagactatatctccaccaccgtcaattttgccgccgcgaccaccatgtcttataacgttccgaacgccaaaatctggggctgggacatgatggcaaaatactctgccgacctcttcaacctcgacctggcctataaccgcacgcgcgggaaagacaccgatacgggcgagtacatctccagcatcaacccggataccgtcaccagcaagctggacattccggtggcgcagagcggtttttccgtcggctggattggcacctttgtcgatcgctcaacgcatatcagcagcagctacagcaagcagccgggctacgcggtcaatgacttctacgtcagctataagggtcaggagcagctcaaaggcgtgaccacgacgctggtgctcggcaacgcctttgacaaagaatactggtcacctcagggcattccgcaggacggccgtaacggcaagattttcgtaagctatcagtggtaattcccgtcggggcaactcttcagaaggataagaaaatgaatcactacacgcgctggcttgagctgaaagaagacaatccgggtaagtacgcgcgcgacatcgcagggttaatgaatatcagcgaagcagagttgacctttgcccgcgtgggtcacgacgcctggcgactgcgcggtgagatccgcgagatcctgggcgcgctggaggcggtgggcgaaaccaaatgcatctgccgcaacaactacgccgttcacgagcaggtcggaagcttcaccaaccagcacctgaacggccatgccgggctggtgctgaacccgcgcgcgctggatctgcgcctgttcctcaaccagtgggcaagcgcgtttcacatcagtgaagccaccgcccggggcgagcggcagagcattcagttcttcgaccaccagggcgatgccctgctgaaggtctacgtcacggataacaccgacgtttccgcctggggcgacgtgctgacccgttttatctttgccgataatccaccgctggcgttgaaggcacccgacgcgcctgctcacgcggaaaatgcgcaagctgcgctcgtggacaacgagtggcgcgccatgaccgacgtgcaccagttcttcagcctcctcaaacgccataacctcagccgccagcaggcgtttcgcctggtgggggacgatctggcctgtcgggtagagaacagcgcgctggcgcaactgctggagacggcgcgccgggacggcaatgaaatcatggtcttcgtcggcaaccgcggctgcgtacagattttcaccggcgtggtggaaaagctggcgccgatgaaaggctggctgaacatcttcaactcaacctttaccctgcacctgcttgaagacgccattgcggagacgtgggtcacgcgcaaaccaaccgctgacgggcacgtcaccagcctggagctgtttgccgccgacgggacgcaaatcgcccagctgtacggccagcgcaccgaaggcgagccggagcaaagccagtggcgcagccagatagacgccctgacggcgaaagggctggccgcatgaaacggtggcttgtcctgttcagcgcactgcccctgctggcgtttgctgcgccgcaggagaaaatcgtcacgctcggcggcgacgtcaccgagattgtctacgcactcggcgcgtcgtcttccctggtggcccgcgacagcaccagccagtggccgcaggcggcgaacgtgctgccggacgtgggctatctgcgccagctcaacgcggaagggatcttgtccatgcgccccacgctggtgctggccagcgcccaggcgcagccctccctggcgctaaagcaggttgagcaaagccacgtccgggttatcgcggttccagccgctaacgatttgagcgtcatcgacgaaaaagtgcggatcgtggcggaagcgacgcatcgcgaggccgagggggaagccctgcgcggcaagctgcgtcaggcgctgtcaaccctgcccacatcgccactcaacaaacgggtgctgtttattctcaaccacggcgggatgaccgcgatggctgccggacaacagaccggcgcggacgcggccattcgcgcggcggggctgcagaatgcgatgcaggggttcacccgctatcagccgctgtctcaggaaggaacgattgccagccagcccgatctggtggtgatttcgcaggacggcatcaacgccctgggcggggaagcgaatctgtggacgctgcccgggctggcgcaaaccccggcaggacgtaataagcaggtgctggcgattgatgacatggcgctgctgggctttagcgtgcgaacgccggaagccatccggcaactgcgggccaaagcggagcaactgccctgatgtcccggcgaatcgccctgtcattgtggatgctggccgcgctgctggtcgtcacgacgctgacggccagcggtattggcgcgctgcgcctgccagtcagcctgctgtggaacgccaccgacgaggccctgcgtcagatctggctgacgatccgcctgccacgcgtgctgctggcgctggcgatcggcggttcgctggcgctcgcgggctgcgtgatgcaggggctgttccgcaacccgctggcggacccgggcctgctcggcatcagcagcggcgcggcacttgccgtcgcgctgtgggtggtgcttccgctctcgctgcctgcactggtgatgctgtatgccccgatgctggcggcgtttctcggcgcgctggccgccaccttcgtgattttcctgctcagccgtcagcgtgacgcttccctgtcgcgcctgctgctggtgggcattgccatcaacgccctgtgcggtgcggccgtcggcgtgctgtcatggctcagcaatgatgcccagcttcgccagctttcactctggggaatgggcagcctcggccaggcgcagtggtcgacgctgctggccgtcgcgtcgctgatgatccccaccgtgctggttatctggcgtctggcagggcccctcaacctgctgcagctgggcgacgaagaggcgcactatctcggcgtggaggtggccgccgtgcagcggatcctgctgctgtgcagcgccctgctggtggctgccgccgttgcgatcagcggcgtgatcggttttgttggcctggtggtgccgcacctggtgcgcatgtggctgggagccgaccatcgggccacgctccccggctcggtgctggccggtgcgctgctcctgctgatggccgacacgctggcgcgcagcgtggtcgctccggcggaaatgccggttggcttattgaccagccttctcggcgcgccgtggttcctgtggctgatctttcgtcgtggaggtgcgcatggctgaacgctattgtgcagaaaaccttgtttttcgcgccgggcaacgcacgctgattaacgccgtgtcgctgaccttatctcagggcgagctggtggcgttgattggccccaacggtgccgggaaatcgacgctgttgcggctgcttaccggctatcttaaacctgctgggggacggtgcagcctggcgggcacaccgcttgcggcctggcaaccggaaaggctctcccgctaccgggcggtgatgcgccagagcacgcagctcggatttgactggccggttgaggcggtggtcggtatggggcgtgcgccctggacccgcacgccagaagcgtcggtgatcgaggaggtgatggccatcaccggttgtttaccgctggcgggcaggcagtttgccgcgctctccggcggcgagcagcagcgcgttcagctcgcccgcgcgctggctcagctatggtgcgacggtgcgccgcgcggctggctgtttcttgatgaaccgacgtccgcgctggatctctatcaccagcagcatctgctgcgcctgctgaaatccctcaccaaccggggacatctgcacgtgtgcgcggtgctgcacgacctcaacctggcagcgctgtgggcggatcgcatcctgctcctgcacagcggcaggatcgtgtcccagggagagccggaaaccgtgttgcaggccgacgcgctggcgcgctggtacggcgcacaggttcacgtcggcaggcatccggctcaccccgtgccgcaggtgtttctcgccccctgaccggtccggattctgacgacgccgactccggccagacactagcttgagcaactgacctccagccgcttgccccactcaggcgggcggctgacgtaatcatcatcccggtcggcaaacggcgtgcgcaacgccacgtgcagacggtgtaactcgtcgtactcgccctgctcggcctgctcaatcgcccgctgcgccagccagttgcgcaacaccatcgccgggttcgtagcgttcatctgcgcctggcgggtcgcatcatccacctgctcctgctgcagccgcgcgcggtacgatgcaaaccagtcgtcaaacacctgtctgtcaataaactcatcgcgcagcggcgaggcggcactgtgctgctccgtctggcccagcatccggaaggtgcgcgtgtaatcactgccctcgcgcgccatcagggcaaacaggccattgaggatgtcgttatcgcccttctcctgcgtgactagccccagcttgttgcgcatcagcgagccatactctcgcagtaagatcgcctgatagctgtcgagcgcatcattcagggcgtcaacatcgatgaacggcgacagggtttgcgcaagccgctgcaggttccacaggcccaccgcgggctgattgtcaaaactgtagcgcccctgatagtcggagtggttacagatgtaccctggctgataatcatccaggaaaccaaacgggccgtagtcaaaggtcaacccgagaagcgacatgttgtccgtattcatgacgccatgggcaaaacctaccgtttgccagcgggcaatcagggctgcggtacgggccaccacgtccctgaaccagagaacgtatttatccgcgtcgtcctgcaactgcgcccagtggtgacgaatggcaaagtcagccagctggcgcaccttgtccggctcgcggcgatagtaaaagtgctcaaaatgaccgaagcgcagatggctttgcgcaatgcgcatcagcattgcgcccttttccacggtttcgcgcgcaaccggcgtgtcgctggtcacgatcgacagcgcacgggtggtggggataccgagggcatgcatcgcttcggagcccaggcattcgcgaatcgttgaacgcagaaccgcacgcccgtcgcccatccgcgaatagggcgtcaggcccgcacctttcaggtgccagtcaaccgtctccccgttgggaagctgttgttcaccgagcaggatccccctgccgtcgcccagttgcccagcccagacgccaaactgatgcccgctatagacctgagcaaggggttgcataccggcgagaagcgtttcgcctccccagacgccagcgcttcctgaacgctgaaacagctcaggcggaatggccagctcttctgccagccgatcgttatgccagataaggcgtgaattttgtaacggtgtgggtttgagtgcggtataaaatcccggcaactcgtcatgccagtgagcagtaaaagacagggtcataagtcctcctgcttttagtgtagagggtttacccggacttaaacacgggcgaaagcaagggttatcgctgctgaaccagcgtagtgacgtgttccgccgagacggcgggccagagtgttccctgcatggcgccaaaattaaaggacaacacgcgctgcaacagaccgtggtcgtcaatgcccgagacaatcacagactggcagtgcggcgtgatttgccagaggatggcgcgcataaatggctcaaaagagagctctgaagcacgctgctgaatgaagcctttatcgagaataacccgtttaaataatccatcatacaccgctttgagcgatgcagcgcctgcaccaaagtttgccagcaccaatgggaaatggattgccattctcgccagctgaagatcgtcctttccgttatttaaacctagataattctcattaacagtaaactcaagaaacggataacgctcaagaattgaaacagcgtttccattacttaataaaaattcaactattgcaggtgtaatattgatccatgcaattaactgatgctgaataaaaaacagtttgcaggtatcaagcaattgcagtttttcgttaaacagcgctaactcttcagccgctgaaagtcgtgggataacaagctcagtggggatccgcacatcgctgtcgacgccagtaaagttaaccagaatttctaaacctttaagctcccctgcgctattacgggcaggcaaaagcagcagttcagactggtaagcattatctagcgtaattatcattgcactcgccccgcattaaagatgagagaggacatcctggagcaattgccgacacaattccactgtcttgattttaataagattaatttcattagttccgtattaattttcagatttttccctgaatttaaaataatcttatcctggttgcaaaataatagccagttttagataaaacagatacatgagggattcgctaattttaggtaaatttaactttaatcatcttatttgagaaaaaacggcatgtttattcgctaccatgccgtcataagagaggtatacgacgaagattatatacgtcgtgcctgccagaaatttttacgccagtaaacattatcaagtgaagagcgcatcacgccgcggctcgtcgaggcgtgaatgaactggttgtcagtatcataaatgcccacatgaagtccgctttcccccgatccggttttgaagaaaaccaggtccccgggcaggaggtcgtctttatcaatttccgtgccgatttctgcctgtttacgcgtttcacgcggcagctgtaaatcaaacttgtcgcgaaacgtcatcagaacgaagccggagcaatctacaccgccacggctcataccgccgtagcgataaggcgtgccgcgccagttgctcagctgatcgttgaggctggcaatgacggtgatcgaatctgaaagccgtgggttaggcggcggtgcacgatggctactgcatcccgcaagaaaaagtgcggccatcaggagaaaccagaatcgcattttcagacgaatcctctgctttttttgttcttttcgtaatttagcgtgcaattgtgctcacaggcaagaaacgcttactcctgcccggtcgaaatcagcatcttatggccctcaatatccagcctgcggaacgacatgttgtacgcgcgggcaagattgggcggcgtaagaacctgatcccgcgtaccgctggcgatcatcttcccctgcgacagcagccacacccggtgggcatgacgcaaggtgtggttgaggtcatgactgctcatcaccacggcgatgccttttctactgagcgcacttagcagggtatccagggccgcctgctgcgccacatccagaccgttcatcggttcatcgagaagcagcatccgcccatgaggattaccggccgggtggatctgaacaatgacagccgccagacgcacccgctgccattcgccgccggatagctggctgacatgccgggagagtttatcctccagccccagcgccgcggccacgtccgtcagcagtgccgtagaatgtttgtcgtgcaaatgcagcatcagatagtgccagaccggcatcgcaaaggggggcacctgctgctgcacgagatagctgcgccgatgcgccagcgagaccggcgaccactcggccagcgtatgctccagcaacattatctgcccttctccggcagtcatgcctgccatccgtgccagcagcgtgctctttcctgcgccgtttggcccgacaagatgcaggatttctcccgcattgacggcgccggttatcggctccagacgtcccttctcggcaacgtccgtgagctgcatcagcagcgacattatttcgccagcgccagcttgatcgattccatgacgatcggatcttcaggggtcatatccggtgaaaaacgctgtacgacctggccgtcgcgacctatcaggaatttttcaaagttccacagaatatcgtccggataaagcggcgcgcggcctttgctggccatgcgttcataaaaaccgctgccttccggcgcgacggctttgggtgcggcagcgatcagcttcgcatacagcgggtggcggtcttcaccgttgacatcgattttgctgaacagcaggaacgttacgccgtaggtagtgctgcagaaggttttaatctcctcttcgctgcccggctcctgccccaggaattggttgcaggggaagcccagcacggtaaaaccatctttctcccaggccttctgaatgttttccagctgctcgtactgcggcgtcaggccgcatttggatgccacgttgacgatcagcaacacattgcctttgtagccttccagcgtggttttatcgccatcaatggtggtcacttcagtattcaggatatctgactgcatagcatttcctcaggttgtcgatttaacgtccagcttttaatagtagccagataaagaccggcgcgcccagcgtggcggtcaccacgccaatgggcagctctgcggccgtcagggcaagcctggcgatgatgtcggccaccagcagcgtgacggccccggcaaccgccgaggccggaagcaaggttcgatggtccgtgattccgcacagtcggagcatatgcggaatcaccagaccgataaagccaatcgcgcccgccagagccacgctgacgccgaccagccagccaatggcgatgaccagcacattacgccagaacccaatcggcatgcccagctggcgggctgaggtttcacccagcgcgagcatattcaacggctgcgcctgcagggcagcccacacgatgaccggcaccagcagcgccatcagccagccctgctgccagtcgacgccgccaaagccgcccatcatccagtacatgagctgccgaaggtcaaaagaggtcgagaagtagaccgcccaggtcatcagcgcgctacagatgatccccagcgccacgccggcaagcagcagacggctggtcgataagtgccgtctggcaaaacgaagaaggatgagcgttatcagtaatgcgccaaggatcgcgctcaggctaatgctccagccggagagttctcctccgcccagcatcaccgctgcaatcagccccacgcccgcaccgttagacacgccgagcagcccgggctccgccagaggattctcaaacaacgcctgcataatggtgccgcacagcgccagcgcggcccccaccagcatcaccgcgacggtacgcggcagacgaatttgccagacgaagagctgtccgtcaggtccccaccagctttcgggccctatccaccggtcaccggcgcagaggctaacgcctgcggcgacaatgagcagcagcaccagaaaaagcaggtgacgccgatcggaacggtgctggagatggacataatcaagcatgtttacggttttcgtagagagagatgtaattgattttacggcgggtttgcctgagagcgcaaagaaaaaaggccgcgtgggcggcctttttagttagttcatattactctgctttgggcgttgcgttttcgacacggctttttaacttctggccgggtctgaaggtcaccacgcggcgggctgtaatgggaatatcttcccccgtcttcgggttgcggcccggacgttggtttttgtctcgcaaatcaaaattgccaaagccggagagttttacctgctcaccattttccagagcacgacggatctcttcgaaaaacagctctaccagctctttggcatcccgtttgctaagcccaagcttatcaaacagatattctgacatttcagcttttgtaagcgccataggttcaatccctcaatgatgcctggaatcgctcttttaatgcctctacacatttggcgacggtagcggcaatctcctcttcttcgagtgtacggctggtatcctgaaggatcaggctgatagccaggctcttaaagccctctgctacgcccttgccgcggtacacgtcaaataagtttacgccaactacctgatttacgccaactttcttacattcggccaaaatatctgctgcgggcacattttccgcgaccacaaccgcgatatcacggcggtttgccgggaagcgggagacgtcctgagcctgaggaatcacgcggtctgccaccaggttccattccagctcaaacacgatggtacggccgttcaggtccagtttacgctccagctcagggtgaacaaccccaataaaaccaatgcgtttgccgtctaaatagagggcagcgctctggcctggatgcagggccggaatggcttctgcgcggaattcaatttcagataatttaccggtcagatccagaatcgcttccagatcgcccttcatatcgtagaaatcaaccgtgccttttgccaggtcccagtgttcttcatagcggttaccgctgatggcgccagccagcatgagatcctgacggatgcctaaatttgcctgattatccggtacaaagcgcaaaccgctttcgaaaattcgcacgcggttttgctggcgattctggttgtaaacgatagtgcccagcaggcccgtccacagggacagacgcatcgcggacatttcgctggaaattgggcttggcaggatcagcgcttcctgacccgggtggatcagctgctgcagctttggatcaacaaagctgtaggtgatcacttcctgatagcctttgtcgttcagcatggttttcacacgcttcagggacaggtcggcttcacggtgggtgcccatcaccagacctgcctgtaccggctcgtcagggatgttgttgtagccataaacacgggccacttcttccaccagatcttcttcaatttccatgtcgaaacgccatgacggcgcaacggctttccactcgtcctggccttcggttacgtcgcaacccagacgcttcagaatatcggtcacctgcgcgtcggcaacgtggtgcccaatcaggcgatccagcttactgcgacgcagggtgatggtcgcacgcttcggcagcgtggcttcgttggtgacgtcgataaccgggcccgcttcgccgccgcagatgtcgatcagcaggcgagtcgcacgctccatcgctttgtattgcagcgcaggatccacgccgcgctcgtagcggtgggacgcatcggtgtgcagtccgtgacggcgtgcgcgaccggtgatggaaagcgggctgaagaacgcgcactccagcagaacgttttgcgtttcgtcgttgacgcccgaatgctcgcctccgaagataccgcccattgccagcgctttgctgtggtcagcaatcaccagggtgtcggcgttcagtttcgcttcggtgccgtccagcagaaccagggtttcgccctctttcgccatgcgcaccacaataccgccttcgatacgatctttatcgaaggcgtgcattggctggcccagttccagcagaatgtagttagtcacgtcaaccacagcgtcgatagagcggataccgcagcggcgcagcttctctttcatccacagtggggttggcgctttcacgttgatacctttcaccacgcgaccgagatagcgcgggcaggcatccacagcgtcaacctggataggcagcacgtcactgatggtcgcttcaaccgggtcgatctccggcgcgttcagctcggtctggttcagcacggcaacgtcacgcgccacgccgatgatccctaagcagtcagcgcggtttggcgtgacgctgatttcgatggtgttgtcatcaagcttcaggtattcgcggatgtcggtgccgattggcgcatccagcggcagctcaatgatgccgttgtgatcgtcggaaatacccagctcggagaaggaacacagcatgccttcagacggctcgccgcgcagcttagccgctttgattttgaaatcgcccggcagtaccgcaccgacggtcgccacggccactttcagcccctggcggcagtttggcgcaccgcagacgatatccagcagacggtcgccgcctacgtttacttttgttacgcgcagtttgtccgcgttagggtgctggccgcactctaccacttcgccgacgaccacgccgttgaaggcaccggaaaccggctcaacgccgtccacttccagacccgccatggtaatctgattagaaagcgcgtcgctgtccagcgtggtgttcacccactcgcgtaaccacagttcactgaatttcattgttctgtcctgctcttatttaaactgtttgaggaaacgcagatcgttttcgaagaatgcacgtaagtcggtgacgccatagcgcagcatggtcagacgctccatgcccataccgaaggcgaagccggagtaaacttccggatcgatacccacgttgcgcaggacgtttggatgcaccatgccgcaacccagcacttccagccatttgccgtttttgcccatcacgtcaacttccgcagacggttcggtgaacgggaagtaggacggacggaaacgaacctgcagatcttcctcaaagaagttgttcaggaaatcgtgcagcgtgcctttcaggttggtgaagctgatgtttttatcaacaatcagaccttccatctggtggaacattggggtgtgggtctgatcgtagtcgttacgatagacgcggcccggcgcgataatacggattggcggcgcctgatccttcatggtacggatctgaacgccggaggtctgggtacgcagcagacgcgtcgcgtcgaaccagaaagtgtcgtggtcagcgcgtgccggatgatggccaggaatgttcagagcatcgaagttgtggtaatcatcttcaatttccgggccagtcgccacggtaaagccgagctcaccgaagaaactttcaatgcgatcgatggtgcgggtaaccgggtgcagaccgccgttctcgatgcggcgacccggcagagaaacgtcgatcgtctctgcggccagacgcgcattcagcaccgcgctttccagctcggctttgcgtgcgttcagcgcctgctgtacctgctctttggcttcgttaatcaccgcccccgctgccgggcgctcttctggcggcagctcacgcagggttgtcatttgaagggtcaggtgccctttcttcccaagatattcgacgcggacattgtctaacgcggcaacatctgaggcctgattaatggcggctgttgcactggcaaccagctctgcgagatgtgacatgattttcctcattatgtcggtgcagacaccgatttggtggagttattctctcaaattcaggcacaaaaaaagcctccatcgggaggcttatctggcgctgtttttcgtttcatctttcacgcgctagcctcctgaagtcaggtgctaaagtaaaagaagaagcggaaaatagcagcattcatgcttgcgttaccttgttgggtaaaaaccgttgagaccttattgaaaagcctgcacgggtaaatgtcaatcttcttacagggttatatgaaaagagggagccaggccccctctctcaactggcttatgccagtgctgctttcgctttttcgaccagagcggtgaacgctactttgtcgaatactgcgatgtcagccaggatcttacggtcgatttcaacagaggcttttttcaggccgttgatgaatttgctgtaagaaataccgttctgacgtgctgctgcgttgatacgcgcaatccacagttgacggaactgacgcttacgctgacgacggtcacggtaagcgtactgacctgctttgataacagcctggaaggcaacgcggtatacgcgtgaacgcgcaccgtagtagcctttagcttgtttcaaaattttcttgtgacgtgcacgtgcaattacaccacgttttacgcgagccatgtgtgctctcctgtatctattctaagttaaaaaagttaaacgaaacgacttatgcgtacggcaggcacgcgatgaccaggcccagatcgcctttagaaaccatggcttttggacgcaggtgacgtttacgcttggtagctttcttagtcagaatgtgacgcaggttagcgtgcttgtgcttaaaaccacctttaccggtttttttgaagcgcttagcagcaccgcgtacggtcttaatttttggcattttaataacttccacttcgcattgttaaataaacgaaacataggcgaacaaaacctatgaaacccgaaggctccacagattttgctgcttgaaggccttactgtttcttcttaggagcgagcaccatgatcatctggcggccttcgatcttcgtagggaaggattcgactactgccagttcactcagatcgtcacggacgcggttaagcacttccataccgatctgttggtgggccatctcacgaccgcggaaacgcagtgtgatcttggccttatcgccatcttccagaaagcgaatcaggctgcggagttttacctgataatcgccatcgtcggtaccaggacggaatttgatttccttaacctggataactttttgcttcttcttctgttccttagaagacttactcttttcataaaggaacttgccgtagtccatgatacgacaaactggcggttcggcgttagggctgatttcaactaaatctactccagcttcttcagccttttcgattgcttctctcagactcacaatccccagctgctcgccttccagacctgttaagcgaacttcctgggcgcgaatctcgccattgatacgattcggacgtgccgtttgaactcgttttccgcctttaataccttattcctccagttgttgaagactgcggctgcgaatctcttgttgcagcttctcaatcacttcacttacgtccaggctgcccaggtctttaccacggcgggtgcgaacggcaactttgcctgcttccacctctttatcaccacagaccaacatatacgggacacgacgtaaagtgtgctcgcggattttaaagccaatcttctcatttctcaagtctgcttttacgcgaatgcccgcattttgtagtttctgcgtcaattctttaacgtaatctgcctgagaatcggtaatgttcatcaccaccacctgcaccggcgcaagccaggttgggaagaagccggcgaactcttcggtcaggatgccgatgaagcgctccagagaaccgagaatggcgcggtgaatcattaccggcacctgacgctcgttgtcttcgccaacataagaggcgcttaaacgccgcggcagggagaagtccagctgtacagtaccgcactgccatgcgcgatcgaggcagtcatatagggtaaattcaattttcggaccgtagaatgcgccctcgcccagctggtattcgaacggaatgccgttctcttccagcgccacggcgagatccgcttccgcgcgatcccaggtctcatcgctaccgatacgtttttccggacgcgttgagagtttgaccacgatcttctcgaagccaaaagtgctgtacatatcgtagaccatacgaatacaggcgttaacttcgtcacggacctgatcttcggtacagaagatatgcgcatcatcctgcgtaaagccacgcacgcgcatcagaccgtgcagtgcacctgatggttcgttacggtggcagctaccgaactccgccatacgcagcggcaggtcgcggtaggatttcagaccctggttgaagatctgaacgtggcccgggcagttcattggcttaatgcagtattcacggttctcagacgaggtggtgaacatcgcatccttgtagttgtcccagtggccggttttttcccacagcacacggtccatcatgaacgggcctttcacttcctgatactggtactctttcagcttggagcgtacgaacgtttccagttcacggaagatggtccagccgtcgttatgccagaacaccatacccggcgcttcttcctgcatatggtacaggtcgagctgcttaccgattttacggtggtcacgcttcgccgcctcttccagacgcagcaggtaagcgttcagggcttttttatcggcccatgcggtaccatagatacgctgcaacatcttgttgttgctgtcgccgcgccagtaggcgcctgcgatcttcatcagcttaaagtgatgacagaagcgcatgttcggcacgtgcggtccacggcacatgtcgacgtattcttcgtgatggtacaagccaggcttgtcatcatgcgaaatgttttcgtcaagaatcgagaccttatagctctcgccgcgcttcacgaaggtttcacgcgcttcgtgccagctgactttcttcttgatgacgtcatagttcgtttcggcgagctcgtgcatacgtttttcgagcgcgtcgatatcttcctgagtcagggtatggtcaaggtcaacgtcgtagtagaaaccattatcgataaccggaccgatcgccattttggtgtttggccacagctgtttgatggcatggcccaacaggtgcgcgcaggagtgacgaatgatctccagaccttcttcatcttttgcggtgatgatggccagtgtcgcatcgttttcgatcagatcggaggcatccaccagctcaccgttaacgcggccggcgatggtcgctttcgcgagaccaggaccgatgtccagggcaacatccattgggctaacagcgcggtcgaaatggcgttggctgccatcaggaagagtaattacaggcattttatatccttatttgcagtgatgccccacacataagagcatatacaaagaaaataatcgtgatttgacaatagattacgacaccatctgaccaacaatcgtcaaattggttcgtcatcattcacctgccggaaaatcagacaacgccggatatacggcaagccttgcaatgttaacactaacaaaagggagattgcaccctctgctggcagattgatgtgctggcactttcgcatgaatttgcaggttgcatattcccggcgctcgcaattttgaaatgcagggctactcttgaacaggtctttaaacccaaaggtgcataccatgaacgtatccagtagaacggttgtgatattgaacatcctttccgccacaggtttattgttgattctcgccgaacgattccactggttctgaaccgccccctacgctggcataacccaatcgttcctgcgaaggggcatattcaggccctgtttggtagactgtggatatcaacgaacaaggattaggttatgccaacaaaacgatttgccgtaaaacactggaaaatggtgctggtgctgattgccatctgcggcgcaatgctgttactccgttgggcggcgatgatttggggttaggcacgagtacagctcatcagaagggacgtcacaagatcagagagaataaacgggccgacattatcatcggcccgtctttattacattctataacccagtgaaaccgtggttctgcggtcggtatgatccggtgcagactctggtggtgaagagttccaggtcacgttgtaggcgactttcagaccaaagtgttcgttgatggccacgttgagcgccgtctcagagttcagcgtcgtgtcgtcggcaccaaatacagaaacaccctgtgtaaatttggtgttatcagtcatctgccaggcataggtaccagaagcgtaaccgagcggttgggttttggtatcgccattggtgtactcgtcataacgcacaccgggaccgaattcaaaacggaggctgtgtaccggaccgttcaggaactgacgaccataacccgcggtgaacacgtcacgctggcgataaccgttgtaacggtcggttaaccagcttgcctgaccaaacaggtagtcatagtcggtcatgttgtaacggctacgtccgcctaccgcatatttctcggaagagcgttcgtcattagcggacgtattgctggcattaccccacagagaccaggcggtggtattaccgtaccaggtgagcgtactgtccgccgtcagagaagagcttttcgtgttaccggattgtgccaggtaccccgcgttcaggttaccttcaaacggttttttcgcggtggagggatcgtccatgacagtaaaaacggaatcatcggcggtcgcgttcatagccgcaaacacgccacccgccagcatcagtgcagcgggcactgtctttaaaagcttcattttattaaggagtccgtacaacaaaaaaagagaccacacggtcccggaatctttcttgaggatcaatgacaaggcgtccagagaaaggtaacaaattataaaaagccgcaaataacatagcaatgttttcttatttcattttttgaataagaacgatcccaaaaagcgttttattttatatgtctccggcctcacttttattcactattcatatttaaaatcatactgttatttacattgccttcctgacaaatggtgccagactaaaaggaacccatgctaaaaggaggtaatgatggttcctatctacaccctgacgctctccccttcccttgattccgccaccctgacgccgcagatttatccggaaggtaaattgcgctgtagcgccccggtctttgagcccggcggtggcggtatcaacgtggcgcgcgccattacccacctcggcggcaaagccatggccattttccccgcaggcggtgctaccggtgaacacctggtctccctgctggcagatgaacaggtggccgtagagaccgtcgaggcgaaagactggacgcggcaaaatctgcatgttcacgtggaatccagcggcgagcagtaccggtttgtcatgccgggcgcgaaactcaccgatgacgagtttcgtcagcttgaagagaaagtgctgacgatagaaagcggcgcgctgctggtggtcagcggcagcctgccgcccggcgtcagtacggaaaaattaaccgcgctgattcaggcggcgcagcaacgcggtatccgctgcatcgttgacagcagcggcgaggccctgcaggcggccttagtgccgggcaatcttgaactggtcaaacccaaccagaaagagttaagcgcgctggtcaaccgagacttgacgcagcctgacgatgtgcgcaccgccgcgcaggagctggtacgcagcggcaaagcgcgatgcgtggtggtttccctcggtccgcagggggcactggccgtcgatgaaacgtcgtccgttcaggttgttccaccgccgatgaagagccagagcacggttggcgcgggtgacagcatggtgggtgcgatgacgcttaaacttgcgcagggtgcgtcactgctggagatgacgcgctacggcgtggcggcgggtagcgccgccaccatcaaccagggcacgcgcctctgttcgctggccgatacgcaaaaaatcgtcgattatctgtcccgaaattaacgtctgttccccttcatcagcatggaggggaacgtcatccccgagtcgccaaacgcaaactatcgactatgctaagaaaacttccatgataacaatgaggtgaattatgagcagtggtgacatcactcgttatgtcgtaaccgtcaaccttcatgaggcatcgcttaccgagctaaatgagctcaacaatgccttcacccgggctaattttctcctcaccctgacggatgatgaaggcaatattcatgatttaggcaccctggcatttggcctgatcggtgccctgaataaagaagaggtccatgcgctggccgccagcctggtggaaagtgtgaccgacaagccagccgaaattgacgtcgacacctgggaaagctggcagaaaaaagaacaataagtgccctgtatgaaattaaaccgctcaggtgtgcgttagttcgtatttttttaccgcaataatgcgctaactttatgatctggcagacaacatgggagagtcaacatgtggcaggctatcagtcatcttttaagtgagcagctgggtgaaggtgaaattgaactgcgtaacgaactgccaggcggagagatccacgccgcgtggcatttacgctacgcagggcgcgatctcttcgtaaaatgcgatgaacgtgagttgcttccgatatttaccgccgaagccgatcagctggagctgttgtcgcgcagtaaaacggtgacggtcccgcaggttctggccgtcggtagcgaccgcgattacagttttctggtcatggaatatctccccgcccgtccgctggatgcccataacgctttcattcttggccagcagctagcgcgcctccatcagtggagcgaccagccgcagtttggtctcgactttgacaacgatctctccaccacgccacagcccaatgcctggcagcgtcgctggtcgacgttttttgccgagcagcgcattggctggcagcttgagcttgccgccgagaaagggctggagtttggcaatattgatgccatcgtcgagcacgtgcagcagcgcctggcctcccaccagcctcaggcgtctctgctccacggtgatttgtggtcagataactgcgcgctggggcccaacggcccctatatcttcgacccggcctgctactggggcgaccgtgagtgcgatcttgccatgctgccgctgcatcctgaacaaccgccgcagatatacgacgggtatcagtcggtttcgcccctgccgcccggcttcctcgatcgtcaaccggtgtatcagctttatacgctgatgaaccgcgccatactttttggtggggaacacctggttaacgcccagcgggcgcttgagcgcatgcttgccgcctgagacgtgaacgggtggctttgccgccacccgtatcggttacagaaaaccgagcagtgagaagaagaagtatccggccacaatgataatcacgggaaggatatagagcggaaaaatttgcaggaaaatggtgtgacgcggcacaacaatgcgggattcaatctgctcccggctcatgccttccgagcctttggcctgctccagaatgagctggtcctcgacgccctcgcgtaagaagcgcgtctgacggctcattcgcgcgccagaggcctgcagcgccagcgcaacaaagatcagggcgtagatcacccaaaagccgatattcagctgatgctgaaaatccggggtcggtgagttaaaccagaagacattcaagaatggcgtattaaaacgcatcatctcaatcatcacatgcgcaaaatcaagcataaccgcattgatacccggctgtttttcgctgtgatcgtacataaatttgagtacagaaatcagcgtagaaatgacggcaggaataaaaatcacccagccagcaatacgttttaagaccgcaatgcgtccagcttgttgatacgtcatcagttcctcttcataaagacgcgttatttgtgcctaagtctacctgctggtcgtcaatttcgcccgctctttaaaagcaatatgctaaattgcagagtgtgcttagcacttatcgtctgtcgaacaccctggataaggagacgttgtgatgtcgacaccgcgccaaattcttgccgcaatttttgacatggatggattactgatcgattccgaaccgttgtgggatcgcgccgaactggaggtcatggccagcctgggcgtggacatcagccgccgtaatgaacttcccgatacgctgggcctgcgcatcgatatggtggttgacctgtggtttgcccaacagccgtgggctggaccgggtcgtgatgaagtgaccgcgcgcattatcagccgcgccatttcgctggtagaagagagcaagccgctgctgcccggcgtacgtgaggccgtcgcgctgtgtaaagcccaggggctcaaggtcggcctggcctcggcgtcaccgctgcatatgctggaaaaagtgctcatcatgtttgaactgcgcgacagtttcgacgcgctggcgtccgctgagaaattgccttacagcaagccgcacccgcaggtctatctggactgtgccgctaagctcggcgtggatcccctcaactgcgttgcgctggaagattccgttaacggcatgatagcgtctaaagccgcgcggatgcgctccattgtggtgcctgcggaagaaggccgccacgatccccggtttgcccttgccgatgtgaagctgatttcactggcagaactcacggcgcatcacctgcggggcggttaagaccctcctgcagtttgtgacaaacagttacaccgtcacctcttccgcctactgtataaaaaccctatactgtatgaattgacagttttatgggttttatcatgacggcggaaggccacctgcttttttctatcgcgtgcgcagtatttgccaaaaacgctgaactcacccccgtgctggcacagggggactggtggcatatcgtcccttccgccgttttgacctgtctgctgcccgatattgaccatcccaagtccttcctcggtcagcgcctgaagtgggtgtcaaaacccatcgcccgcgcgttcggccaccgggggtttacgcacagcctgctggccgtgtttggcctgctgacgcttttctatttaaaagtgcccgaaagctggatcgtccccgccgatgccattcaggggatggtgctgggctatctgagccatattctggccgatatgctgacgcctgcgggcgtaccgctgctgtggccctgccgctggcgcttccgttttcctatcctggcaccgcagaaagggaaccagcttgagcgcgtcttgtgcatggcgctgtttgcttacgccgtctggatgccgcaaacgttgcccgaaaacagtgcagtccgctggtcttcccagatgattaattcgctacaatttcagttcaatcgctttattcatcaccagattgaacagtaaaccaacaaaactatcccatttgtcataacccattccatttggatataagcgcgacatcacacttctgctaaccttccgccaacaggatcggtaaaaaccgacccgataataaatcaggagaacggggatgaattttccactcatcgcgaacgtcgttgtgttcgttgtattgctattgcttctcgcgcaggcgcgccataaacagtggagcctggcgaaaaaggtgctggttggtctggccatgggtgtcgtatttggtctggcattacaggctatttatggctccgataatccagtactgaaagattccattcagtggttcaacattgtcggtaacggctatgttcagctgctgcagatgatcgttatgccgctggtgttcgcctctattctgagcgccgttgcccgcctgcataacgcgacccagttgggaaaaatcagtttcctgaccattggtacgctactgttcaccacgctgattgccgcgctggtgggtgtgctggtcactaacctgtttggcctgactgcagaaggtctggttcagggtaccgctgaaacggcacgtctgactgcgattcagaccaactacgtcggtaaagtggctgacctgaccgtgccgcagatggtgctctccttcattcctaagaacccgtttgctgacctgaccggtgcgagcccaacctccatcatcagcgtggttattttcgccgcgttcttgggcgtggcggcgctgaagctgctgaaagacgatgcgccaaaaggcgaacgcgtgctgaccgcgattgataccctgcaaagctgggtgatgaagctggttcgtctggtcatgcagctcaccccttacggcgtgctggcgctgatgaccaaagtggttgccggctctaacctgcaggacatcattaagctgggcagcttcgttgtcgcctcttacctgggccttggcattatgttcgtggtacacggcatcctgctgggcgtgaacggcgtcagcccgctgaaatacttccgtaaggtctggccggtactgacctttgccttcaccagccgttccagcgccgcgtctattccgctgaacgttgaagcccagactcgtcgtctgggcgtgcctgaatccatcgccagcttctctgcctcctttggtgccaccattggtcagaacggctgtgcgggtctgtacccggcgatgctggcggtaatggttgctcctacagtaggcatcaacccgctggatccggtctggatcgccacgctggtcgggattgtcaccgtaagctccgcaggcgttgcgggcgttggcggcggcgcaaccttcgccgcgctgattgtgctgcctgcgctgggtctgcccgtgacgctggttgccctgctgatctccgttgagccgctgatcgacatgggccgtaccgcgctgaacgtcagcggctctatgaccgccggtacgctgaccagccagtggctaaagcagaccgacaaagcgattctggaaagtgaagacgacgccgaactggcgcatcgttaatcgctgtagaaataaaaaaaccgccaacaggcggttttttttatggctgttattcttcaacctcttcatcctggcggatctgcatcgcccaccgttgcgcggactccggcaccgtaaaggtgggagagcgacggaaatgctcgccgatcagcacaaaggccacgtatttcccccgtaactgccacacatcgcgaaaaccctccactttcagggcatggtctggcggcgcgggctcaacgcggggcacatagctaataacctggcggttttgttgacgaagaggtttcataagcgacggattcactaaagcaaattcttgaagcaggaaaattctatgatagccgatcctgctgccttccgtcgcgctccgagtgggtgagatggctcctttcgttaatgatggcatgtgaaaactcttagttcgcgagccatctcacgacattgttctatccttaatagggtttttagcaatggataaaggagaagcgtgcaatgtcgaacaaagataaaacacatcaatcaccgattcatagcactgaagaatctcaaccgggcatggactctctcgccccttctgacggctctcaccgcccctccccgggcccttccgcaccaggcgaacagcctaccgcgccgggaagcatgaaatccccggatacgggaaacgagaagctgaaatcgcttgagccacaccgtaaaggcggcgaaggttttgcgctcaccaccaatcagggcgtgcgcattgctgacgatcagaactcacttcgcgcaggctcgcgcgggccaaccctgctggaagacttcattctgcgggaaaaaatcacccattttgaccacgagcggataccggaacgcatcgtccacgcacgcggttccgctgcgcacggctattttcagccctacaagagcctgaaggcgatcaccaaagcggacttcctctccgacccggataaaattaccccggtatttgtgcgtttctccaccgtgcagggcggcgcaggttcggcagataccgtccgggatatccgcggctttgccaccaagttttataccgaagaggggattttcgatctggtcggcaataacacgccggtgtttttcattcaggacgcgcataaatttcctgactttgtccatgcggtaaaaccggagccccactgggccataccgcagggacaaagtgcgcacgacaccttctgggactatgcctccctgcagcctgaaaccttacacaacgtgatgtgggcgatgtcagaccgcgggatcccccgcagctaccgcaccatggaggggtttggcatccataccttccgaatgatcaacgccgaggggaaagccacgtttgtccgtttccactggaagccagtggcaggtaaagcctcactggtgtgggacgaggcgcagaagctgaccgggcgcgatccggacttccatcgccgcgagctctgggaatccattgaagcgggcgacttcccggaatacgagctcggcctgcagctcatcccggaagaggacgaatttaagttcgatttcgaccttctggacccgacgaagctgatcccggaagagctggtaccggtgcagctggtgggtaaaatggtgctcaaccgcaacccggataacttctttgccgaaaacgagcaggccgcgttccacccggggcatatcgtgccggggctggacttcaccaacgatccgctcctgcagggacgcctgttctcctataccgatacgcagatcagccgtcttggcgggccgaacttccacgaaattccgattaaccgcccaacctgcccgtaccacaacttccagcgcgacgggatgcaccgtcaggatattgataccaacccggcgaactatgagccgaactccatcaacgataactggccgcgtgaaacgcctcccggaccgaaacgcggtggatttgaatcctatcaggagcgtatcgatggcaataaaattcgcgagcgcagcccctcgttcggcgagtattacgcccaccctcgcctgttctggaacagccagacgccgattgagcaacagcacatcatcggcggcttcagctttgagctgagtaaagtggtgcgcacctacatccgcgagcgcgtggtcgatcagctggcgcatattgatgttcagcttgcccagagcgtcgcggacaacctgggcattacgctgaccgacgagcagcgtaacctcgctccgccgaaagaggttaacggcgtgaagaaagatccgtcgctgagcctgtatgcgttgccgggcggctcgattaaaggccgcgtggttgccattctgctgaacgacaaaacccgcgccagcgacgtgctggggatcatgcaggcgctaaaaacccagggcgtgcatgccaaactgctctattcccgcatgggtgaagtgacggccgacgatggttctgtgctgccggtcgcggcgacctttgccggtgcgccatcgctcaccgtcgatgcggtgattgtgccgggcggagatcttgccagtctgctgaccaacggcgacgccgtctattatctgctggaagcctataagcacctgaaaccgatcgcgctgtccggcgacgcgcgacagtttaaagcgcagctgaaggtggccgatcagggtgaggacggcattgtcgagggcgataacgttgacgatgccttcatgacgaagctgtttgatttgctcgccgcgcaccgcgtctggtcacgcagctgtaagatcgatcagattccggcgtaaaaaaaagcccggtggcggcttcgccttaccgggcctacaagagttagcaggtcgttcgtaggccgggtaaggcgaagccgccacccggcaactcttacagctccctgaacgtccccaaccgatacccgcgttcggcaatcgcgtatttcagcgaggccgacgtcagcacgtccagctccgccagccgcggccagcagtaggcacttttacgcacggtgttatcgacaaaggcaggatgcgccatcacttccaccgaggtttcaccgcgggcagcggaatcatccagcaccttcaggaacagcgcttcgctgatctcttctccgtaaaacgcgctactgaacccctcagtggatgtaacagcgcagtccggcaattcgtgcacctcgcgatccacgcgcatcgccacgcctttgcgctgcgcaaacccggcgacaacagggaaaattgccgggatcatatgcacgtggtgatggctgtcgatatgcgtcggcgcctgaccaaacacatcaacgaagcggttgaactggcactccagctcgcgggcaatctcttcaagcggcagagcaccctgctccgcccgttcccaaatccatttacccagctggccgtcgcgcgtcaggcccggcattggcgaaagcggcatcccgagcgtcagcacaaaatgcatgccgacgcccagctctggcacctcgcggctcagctgcgccgcgtgttcaaccgcctcagcgttaaccagggccgttgtagaggtcacaaccccccggcgacaggcttcaataatgccgtagttctgacctttcgagagaccaaaatcatcagcattaacgatcagcaggttttccattgtacgtcctcttattgctgtttgaacttcagcttctcgatcgtggcggcaaagttcggcagccatttttcatgcgccaggatcatctcgctggccagctgctccgcgtcacggtcagaatgcaccagcgggctgaggttcagggccagcagcacgtcattgagctccccgctcagcgccgcgttgcttgctgccacttcaaagcctttgatggtatgaatcagccccatgaccttgtcatcgaagtgggtgatacggggatgcggtttagccccctcgcgccccaggatgcaggtcatttcaacggcccagtcagccggaatattgtcgacatggccgtgatgcgggacgttgacatagtgctcagcctgcttgtcgttgtagatggcgttgatcacttcacacgccgcatcggagtagtaggccccgccgcgctgctccagctctttcggtttgacgttcaggttcgggtctttatacaaatcgaacagctgcttttcgaccttctgaacgatctgcgcacgcgcgccgcccttataatactcgcccatttcaatggccagcatctctttctgcttgaagtgagctactgatgaaggttgagagtgatacaggcgcaagtctgatatcgccactcacagaagatgagttaatgaatgcgttttattatatggaaaacctttaagagcgacagctatgagcgataaacggtcctttaatccattctgtatcagatgcaggactaacactagcatgtgataatcaaccggggataggtcatcgcatccggtcaggtagtggcgatgtgattctacgttgtgagaaatgaaaaaagatatttggtgtaaaaaaatgacgaaaatggacgatgactttttacaatatgatctggactggtttttatccagccaggaagggtacttagcgcattttgcaacagcaggtcaggggccgattcctgaaaggatcaagtcatctgtcgaggactataattttatttttgattatatttactcgctggaacccttgtcagaggtgtatgtgatagaaggcaatttgcctgcattttcaaatgacaatcaacgttcttcctatctgcgctcatttgttgagatgtcaagtaaaggattgttcagctacgactatgaacaaggtggatataaattaatttcgaaaccaaaaacaccattgaaatatgaaatattgccaaatgaagtgaaaggcgtgatttatgttgcagatatagaaattgacttatagatatgatgtgctgatgcgacctgtgctcaattttttgacaaataatagccatagaaagtccgatcttgtcacagcgcggatcggctcgaagatcgatgtccgctgtgagcgtagagcggaaattgtctttatgaatgacttttacattgccaaataaattattattttccgctttttctggttaatcacgaacaccatcataatcgttaagtatttgcattaacattattcttggtatatcttttgtggatattctgaaactggtactcaggcgcgaggcaatcatagcggaagtaattttattatcatcgtaggcgatggtcatatgctttccgatattctgtcgggtcatgtccgacaaccttttgccacattcatcggaaaatctaaagactaaattctctgcacctatctcatccttctctacataatcaattgtctttacacatccagaatcaaacaaagttttctcattaccgaccgaaaaaataaaactcccttttgctgcagtcgatgtcaatggcacaagcaccacgagtaacaacaccccaaatttgatttgcatcttcttctccttttatttgttgacctgctccccataaattaacatatctcaacattatccacgtctgcttttggcacaaagcagacattcatattcacatctatcatcttccccctctttcgccccacagccacgcttgcccattattttgccgaacggaaaaacagtaaccgttaacccggcccctcgctccccgccgccagcagcggcaccaccacgtcgctgatgggcaccgcaatcccgtgtttgcggccgtagcgctggatcacgccgttgcggatgtcccactccatcgggcgatccgcctgacggtcagcgagaatcgacgtgccgaggtcctcaggcgcgcgctgaaagttcgccagaatctcctgcgccacgtcatcggccagcttcgccccctcggcgcgggcgacagtaagcccctcgcgcaggtaggccagcgcaagctcgctgatatcctcgcgcctgaacatcccggcgcggcggttagcgagcaccatcagcccggctacagcattttgcagcagcttgcgccaggcgacggtggggaaatcagccgagagttcaacttcacagcgcgtaccgcgaagcgcttcgaccacccgctgcgcctgcggcacgtccggcagcgtcaggcgcggcttcgcccgtagccagacggaggcatccggctcgcgctgcgccgggaaccagaccaccgacggcagcaccgttgcgccactgaccaaaggctcaagctgcgccttctgctctacgccattttgcagcgcgcagaccacggtattttcatcgcaaagggcgcgcagccacccggcgctgtcggcattttgcgtcgtttttaccgcgataaacacgaggtcaacggggcgcgtgatggcagtcggatcggtgaataccggaccgggcaccaccgtttcaccctcatcgtgacgcaggcgtaattccggatgcgcggtgcgtccgcagagcagcggcgtgcggcccgcgtcatgcaacaccgcggcaatggtggtgccaatcgcaccgggaccaatcagcgcaatggttggatagtcagacatgtgtcactccccttttgctaagcctgctatcagttataccaccctgagacgagcgcgccacacccgttgtctatactcaacattcacagacaacggagtgcgccatgcctttacctgattttaaatcctctgaaccgttcacccttggcatcgagctcgaactgcaggtggttaacccgccggggtacgatctcagccaggactcctccgcgctcatcgccgccgtcaaagacgacatcaaaggcggtgaagtcaaacacgacatcaccgaaagcatgctcgaaatcgccaccggcgtgtgtcagaccatcgaccaggcggcggcacagttctcggtgatgcagcagagcatcctgcgcgcggcggcggagcagcacatccagatctgcggcggcgggacgcatccgttccagaaatggcagcgtcaggaggtgtgcgacgacgagcgctataacgtcacgctggagcgctttggctacctgattttgcaggcgacggtgttcggccagcacgtgcacgtcggctgccggaccggggatgacgcgatttacctgctgcacggcctgtcgcgcttcgtgccgcattttatcgccctggcggcagcctcgccgtacatgcagggcacggacacgaagttctcctcgtcgcggctcaacatcttttcagggttcccggataacggacagatgccgtgggtcaacagctggcaggagttcgaagggctgttccgccgcctgagcgccaccagcatgatcgacagcatcaaagatctgcactgggatattcgccccagcccgcattttggcaccgtggaggtgcgggtgatggatacgccgctgacgctcggccacgcgattaacatcgccgggctgattcaggccacgtcgcactggctgctgaccacgcggccgtataagcatcaggaaaaggattttctgctctaccgttttaaccgttttcaggcgtgtcgctacgggctggaggggatcctgacggacgtgcacaccggcgagcacaaaaccgtggcggaagatatcgcctggctgctggagcaggtggcgccgtcggccgagaagctcggcgcgacaagcgcaatcaatgaaattgccctgctgttaaagcagggcaagagcgaggcgcagcgcatgcgggactttatcgccgacggcggctcgctgatttctctggtgcagaagcactgcgagctgtgggcgacgagtccgtaaggccgtggccccactcccgcaggcgctggaacagcacgaacagcgcggggatgaacagaatccccaccacggtcgccaccagcatgccgctgaagaccgtggtgccgatgatgcggcggctctgggcgcccgccccggtcgccagcatcatcggcaatacgccgataatgaacgacacggcggtcatcatcaccgcccggaagcggcgcgaggccccttcccgcgcggcatcgacaatcgccattccgtccatacgccgcgcgcgggcgaactcgacgataagaatcgcgttcttggccgctaacgcgatcagcaataccagaccaatctgcacgtacacgtcgttggcgtagcccaccagccacagccagaccagcgccccaccgagcgcgaacagcaccgagagcatcacgcttgccgggagcgtccagctctcgtactgggcgacgaggaacagccacgccatcaccaccgccgccagcacgatccagatcgcctgattgccggtctgctgttcctggtacgacatgccgctccaggcgtagtcgtagccggccggcaggctctgcgccagaatctcgcccatcgccgccatggcggtgctgctgctcaccccagcggctgccgagccgctcaccgacacggacgggaactggttgtactgctgcaggaacggcgcgccgacggtcggcgtgatggtgacgaggttgctcaggcgcacccgctcgccgctgttgctgcgcacgaacagctcgccgatctgctcggcgcgctcgcgccacggcatctcgttctgcattaccacgtggtagacgcggttgttgatgctgaaatccccggcgcgggtgccgccaaaggcggtttgcaggctgctgaagatgcgcgataccggcacgtcgaggcgggcggcgcgctcgcggtcaacggtcagcgtcagctgcggcacgttgctgctccaggtggtgaacacgcggctcagctgcgggtgctggttggctttcatcagcacctcgcgggtgacgcgctccagctccgccgggctctgccccgcctgagactggatacgcaggtcgaagcccgaggcgttgcccagccccggcagcgtcggcggcgcgaaggtcatgatggtcgcctccggcagggccagcagctggcgctgcagggtacccatcacctcgtccagcggcggacgcgcgctccagtctttgagcatgatggagataaacccgccgttggaggcgctggtgccgttgaggatgttaaacccggagacctgaatcacgtcttccaccgccggattttgggcgatcagctcccgcgcggtggtcatcaccgcttcggtgcgctccagcgaggctgcctccggcagttggacgctggcgaagaagtagccctgatcctcctggggcaggaagccctttggcatcgacatgaagctgaataccaccaccgccgccgcgcctgcggtggccagcagcgccagccacggacggaggttgaacacgctcacgatccgggtgtaaagcgtgcgcgtggcgtccagcccgcggttgaacccacggaaaacggcggcgggctgtgccggacgcgggcgcagcagcatcgcgcacagcgcgggcgtcagggtcagcgccaccaggcttgagagcgtcacggccgtcgagagggtcaccgcgaactggcggtacagctcgccgacaatccccggcagcagcgccaccggcacaaacaccgccagcagcaccagcgtggtggcaatcaccggcccggcaatctggcgcagcgccagcgcggtcgccgccgtgcggctctgcccttccgccatcagcgtttcgacgctttccaccaccacgatggcgtcatctaccaccatggtcagcgccagaatgatggcgaacaggctcagcgtattggcggagtagccgagcgcgtagagcaccgcaaaggtgcccaccagcgacaccggaatggcaagcgcgacaatcagcgtcgcgcgccagctttgcaggaacagggaaacgacgataaccaccgccagcatcgtgagcgccagcgagacgcagatctctttaatggtggcggcaacgaaggtggtggtgtcgaatttcacctcatagaccaggtcgtccgggaagcgcgtcgagaggcgctccagctccccgcgcaccgcgtcggccacgcgcagggcgttggcggacggcgtcgggtagatacccaaataggcggagtcgtgcccgttcagctgcgcgccggagctgtagctgcgcgagccgagctcgatggtggcgacgtccttcaggcgcaccagctggcccatctccccggcgcgaataatgatgtcggcaaactcgtcggcctggcttaagcgccccagcccgttgatggtcagggtctgctgctggccgttaaacaccggcggggtgcccacctggccggccgccccctgtacgttctgctcgcgcagcgcctgcgccacgtcatcggtggtgacgttcagggcgttcatgcggtccgggcgcagccagatgcgcatgctgtagtcgcgcgcgccgaacatctgcacctgcccgacgcccggcagacgcgacagcgcctcgcgcacctgggtgctggcgtagttgctgacgaacagcggcgtgtgggtgttattcggtgagtaaagacttacccccatcatcaggttggtggcgcgcttgcgcacctgcacgccgttttgctgcgcctcggtgggcagctgcgccacggcctgcgccacgcggttttgcacgtcgatggccgcgagatccggatcggtgcccgccgcaaaggtaatgttcaggctgtaagtgccttcgtccgaactggtggactccatgtagagcatatggtccacgccgttcagctgcgtctccagcggcgtggcgatggcctccgccacgtcagcggagctggcaccgggccagctggcagagacgttcaccaccggcggcgcgatctgcgggtactgctccaccggaataatcctcagcgcaatggcccccagcagggtgatgaccagcgcaatcaccatcgcgaagcgcgggcgtttgatgaaaaacgtcagcatgatggctccttaattcagtatctggacagcagcgccgggctgcacgcgctgcgcgccgtcagtaatcgctcgctcaccgggcttcacgccagaggtgatctggaactgctggctaatctgaccagccacgttcagcgggcgcatttcggcgttgccgtcggcattaacgacccaggcaaagtagccgtcgccgttctgctggaccgcggcggcgggcagggtcagcaccggctgttcacttgccgggcgcaaaaacacgttcacattgccgccgggcagcagctgatggcgcggattggcaaactcggcgcgcagcatcacgctggcggtacgcgggtcaacgcggttatccactgacgtcagctcgccgctgatgcgctggccgttgctgtcgatcagcgcctgccaggcacgcttcatggcgttgatatccgcatgctgtccggctttggcggcaaacaccccctcttccagcgcaaaggcgatgcggatcgggtcaagctgcaccacctccaccaaaacgccgctcgccgggttgaccaggctacccacgtggaagctgctgtgccccacgcggccgtcaatcggcgaggtgatgcgggtgtagctcagggtgacgcggcgggcgtcgagccgggccttcgcctgatcgagagcggcgctggcgacgtcgcgctgcatgcgggcgttgtccacgtcgtgacggctgatggcgttgctgctgccgaggctttcaaagcgggaaagctgctgctgcgcctggcgcagcgtggcttcggcgcttttcacttcggcctgcgccaggcgcagggcggcgcgcggctcggcgtcgtccagctcaaacagcacgtcgccttttttcacgtactgcccgtcgcggaagtggattttggcgatcgcgccctccgtgcgtgcgcgtagctcaacggtgtgaatggcttcgatgcggcccgggatctggcgctcggcggcgtgggcggtttgctccacggtggcgacgcgaacgggaatggcggcgaatgcgggttgcagggtactgacaagaagtgctaacaggaccgggaatttcatgggagtacctcagcgttgtttctccccccaccccggccctctcccctgtggggagagggttagggtgaggggtaaggttttcgttatgcagccttacggaacctgcgggtcagtcgcttctcgatttcgacgacgaagaacatcacgcctgcaacggccagggtcacaaaccagtagcgcagcggcagcgcttcggtaccgaacagcatctgcataaacggcaggtagataatcgccgcctggagcaggaacagcacgcccgtcaccagccagatccctttgttcgccagcaggccacggttgagggagaacccttcggtgttgcggcagttaatcatgtatacccactgggcgcagaccagcatctgcagcagcacggtgcggatgaactccgcgctgtggccgcgcggggccagccaggcttccagcgcaaaggcggcgatggcaatcatggtgccgacgaaggccacgcgccagacggcgtaggcgtccatcacgtgctgcccggtctgacgcggcggacggcgcatgatgttgcgctcggcggcttcaaaggccaggccgaaggagagcgtggcggaggtcgccatgttcatccacagaatcagcaccggcgtcagcggaatgatgttccccgccagcagcgcaatcacaatcagcagcccctgcgccaggttggtcggcatgatgaacaggatggtcttcttcaggttgtcgtaaacgcgacgcccctctttcaccgcgctggcgatggtggcgaagttatcgtccgtcaggaccatgtccgccgcctctttggtcacttccgtgcccttaatgcccatcgcaatacccacgtccgcctgacgcagcgccggggcatcgttcacgccgtcaccggtcatgccgacaatttcgcctttgtcctgcagcgctttcaccaggcgcagcttatgctcagggctggtacgggcgaagatgtcatacttcactgccgcgtccgccagggcggcatcgtccatcttctccagctcatagccggtgaccgcctgctcgctgttgctgatccccagcatctgcccgatgctcattgccgtctgcgggtgatcgccggtgatcatcttcacgcggatccccgcctgctggcaggcgttaatcgcgtcaatcgcttccgggcgcggcggatccatcatcccggcgatgccgaggaagatcaggccgtggctcaggtcatcgtgcgtcagttcctgctcgccgttcgccggcttgaacgccgcggcgaccatccgcagcccctgacgcgcatagcgctccatctcactttcccagtacgcgcggttgaaggcttccgcaccgtgacgggtctgctgctcggcgcacaaggcgaaaatgacgtccggcgccccggtgatcaggatctgctcttcaccgccaatctggtagtgggtgctcatgtacttgtactgcgagtcgaacgggattttgttaaccagcgtggtcgtgaccggctcaaggttggccttcgccgccagcaccttcagcgcgccctcggtcggcccaccggtaatgccccacagcccgcgctcgtcctgaatcagctgactgtcgttacacaggtcgatggtgcgcaggtactgctccagcacggtgcccggctggatgtggaccggctcgtcgctgccttccagatagaggttgcccaccggctcgtagctgttgccgtccacgcggtagcaggcgtcggcggtgatgatggctttgaccgtcatctcgttcatggtcagggtgccggttttatccgagcagaccacggtcatcgcgccaagcgtttccaccgtcggcagcttgcggatgatggcccgcttgcgcgccattgcctgcacgcccagggagaggatgatggagataatcgccggcagaccttccggtacggaggcgaccgccaggctgatcagggagagcagcagctcgcccatcgggatctcgcggaacgccaggctgaaaacaaacagcgcggccatcatcgccagaataatcgcaaagatcgccttacccagcttgtccatctgcaccagcagcggcgtacggtgcttctcgatccccgccatcatctggttgatgtggccgagttccgtatcctgaccggtggcggtgaccacgccgacgccgccgcccgcgctgacggttgttccggagaagaccatattggtgcgatcgcccagcggtaattcgccgctcagcggattaacgtgtttatccaccacggtggattcaccggtcagaatcgcctcttccacgcgtaaattatgcgcttcaattaaacgcatatccgccggaatacgatctcccgcacgcaatacaataatatcgcccgggactatttcagttgtgggaattgtttcatggttgccgttacgaataacgcgcgcctcgctggcgagcatattacgaatactcttcagggatttttccgcgttgctttcctgaatatgaccaattaaggcattgattaccgccacgcccaaaataaccagcgtatcgacccagtggcccattactgccgttaatacggcggcggccagcaggacataaatcaggacatcattaaaatgggccaggaaacgcagccaggcggatttcccttttttctccggcagcgcgttcgaccctgttttttgcagacgcgcctgcgcctctgcacggtccagaccgctggcctggctctgcgcgtgtgcaagcacctgctctacggtctgctggtatgccagcccgccggaaggcggcacgttcggaatcacttttttttcagtcatcgtatttttccttcaatttccggtgaacagaagcctgaattcctttcgggcttaaataaattcattttaaagtcttgcgggtaaaattgatctaccgcaatataatgacttctcggttattcaaaactgattaaaactatttcgacgatctgatttttacaaaatatttctaaaccaaaactaaacgagggggaaccatgtggggtatttatcgcgggcgcagactggtgttatacgttatcgcggccattgttattgccacgttaattggttatagcacctatacatttgtaaaattattttcctgagacggacgtttatttacactacgcgataattatttaatcgcgtctgggatatttatctttttctgttaattattcacagaatagcgcattcgttttatccgtaaacgtgcgccgggtttatattgctttacgttccgggatgccggacaatgacatttttaactgacgattaacattacgatgaaacacccgctagaatcgttgctcacggcaggcggcattttattgctggcactgctttcatgcctgctgctccctgcgccttcgcttgggctggtactggcgcagaagctggttcagacctttcacatggtcgatcttaaccagctctataccattctgttctgcgtgtggtttttactgctcggggcgattgaattctttgtgctgcgtttcgtctggcgacgctggttttcactggcggcgtgagcccataaaaaggccgggtggcggctacgccttacccggcctacacgcgacaggttaatgtgtctggctatggttctctttacggtacgcgccaggcggctggttgaacgtgcgggtaaagatgcgggtaaacgtctgctgcgagtcaaacccgtaacgcaggcagatgtcgtacacccgggcgtcggattcacgcagatcgcgcgccgccagcagcagcttgcgttcacggatatagcgccccagactctcccctttgtactgcataaacagccgctgcaggtgccacttcgagtaacccgcgtggcgggcaatctcttctattcgtaatggctggtgcagattgtcgtcgatccattcgacgatagtgtcgatgacttgagcggaaatggtcatactgctgtccccctctgcttctcgcttaaacattattcccaccacgcacgaaaggtttgcgcggtgtcgcttacccggacgggctcgcccagttccggcgtcagcaaccgataatttttatcctggctggcttttgccagctggatcagcggatcgttccaggcgtgtttcgccagcacgaagcgtccgttatgcccgggcaccacggctttcgcgttcagatccgccgaggcctgcgccgtttcctccggcagcatgtggatgtacttccagtcctggtcgtactggccgttttccatgatggcgacgtccacttcgccaaactgttcaccgatggccctgaagtgcgggccgtaaccggaatccccgctgtagtaaaccttctgctctggcgtgacgaacatgaagctgccccacaaggtgcgatcgcgtttgatgccgcggccggagaagtgacgcgccggcagaacgtgcaccgtcaacgcatcgctgatgcgcaccgactggttccagtcgcgttcgtcgataatctcgggtttcatcccccagtaacgcagatgggagccgacgcccagcggcgtcaccacccgcttcaccttcggcagtagcgccctgatggtggcgtaatccagatgatcgtagtgatcgtgcgagataatcagcaggtcgatcgccggcatgatttcagcccgccacggatactcgccggcaaaagccttattgaggaacgagaacggcgcggcatagttgccaagaaccgggtcaatcagaatccgtttacccgcaagctgcagataccacgaggagtgaccgagccacaccagggtgtcctgctccagcggcaggctcgcaagatcggttttcaccagcggcagcggctgggccgggcgggcgttttcggtttttttggtcagaaactcccacatcgcgaccagcatatttttgtcaccgttataacccggcgtcggcagcgtattgtggaatttcccctcgcgatactgtggagaggcctccacttcagtaagccgttcaccctgcggcggctggccgaatccggcattcagaacaaacggtaaactcgcggctgaagcaataatcatgattaacaccacgcagatgaagagaggttttttcatatcctgacccgaaaacgcgccccatccgatagcgtgcgcagggtaaacttgattatgagtgagtaagcactcattatagatatgatgataaagtcgtcaagacgttttcgatctttgacattccgcgttgcagcgtgtcaaagcacgtgtttcaatcagggtttttataattgacaggaggaaaaatttagtggcacgtccgaagagtgaagataaaaaacaggccttactggacgccgcaaccacggcgtttgcacagtcaggtattgccgcctcaacggcgctcattgcccgtaaggcgggcgtcgccgaaggcaccctgttccgctactttgctacgaaagacgatctgctgaatgccctctatctgcacctgaagcaggatctctgccagaccatgctggcgaacctcgatcgcaccattacgctgcccaaagaacatacccgcaatatctggaacagctatgtagactggggtattcgtaaccccgttgcccatgcggcgatccgccagattggcgtcagtgaaaagctgagcgccgaaacggaacaggcggtgaaagagatgttcccggagctgcatgagctctgccgccgctcggtgcgtcaggtgtttatgtctgatgaatttaaaacgtttggcgatgcgcttttcttatcgctggccgaaagcacgatggaatttgccacccgcgatccgtcccgcgccgttgagtttaaagcgctcggctttgaggtaatgtggcgcgggcttgcccaggaagagagcgatggacagtaaaacgttgcaggaacacgcaaaacgcgtggcgctggaactgccgttcaccgaacactgctggccgtttgggccggagtttgacgtgtttaaagtgggcgggaaaattttcatgattgtggccgtcgcgcacgggcggccgcacgttagcctgaagtcagacccggaaaaatcgctgttaaatcagcagatttatcgcggcgttgaaccgggctatcacctcaacaaaaagcactggatttccctttacggtacggacgacgtgacgccggaactggttaccgatctcatcaatgattcctggcatctggtggtggataaactgccgaaaaaagaccagaagtggatccggccggtctgattgttcgtctgagacgaacagattaagcgctcgaattgcccttatctttttccacgtcccgctgtaatctgctcacctttcgcgcccgcacgcgggcgaatttcatcatcaggagttgttatggatatcatttctgttgcgctgaaacgccactccaccaaggcgttcgacgcaagcaaaaaactgaccgctgaagaagcggaaaaaatcaaaaccctgctgcagtacagcccgtccagcaccaactcccagccgtggcactttattgtcgccagcaccgaggaaggaaaagcgcgcgtggcgaagtccgcggcgggcacctatgtgttcaacgaacgcaaaatgctggatgcctctcacgtggtggtgttctgcgcgaaaaccgcgatggacgacgcctggctggagcgcgttgtcgatcaggaagaagccgatggtcgctttaataccccggaagcgaaagcggcaaaccataagggccgtacctactttgccgacatgcaccgcgtggatctgaaagatgacgaccagtggatggcgaagcaggtttacctgaacgtcggtaacttcctgctgggcgtggctgcgctgggcctggacgcggtaccgattgaaggtttcgacgccgcgatcctcgacgaagagtttggcctgaaagagaaaggcttcaccagcctggtggtggtgccggttgggcatcacagcgtggaagatttcaacgccacgctgccgaaatctcgcctgccgctgagcacgattgtgactgagtgctaaacaaaacgggccgctctgtgcggcccgttacgctttactgatgactaacctgcgatgtgggtgcacatcacgatcgtgtccccaggcaaacgcaatccagcgctcttccagctcggcatatgagctcaccggcgttaagtgccactcttctcctaccgtaccgtcagccacgcttatccgataattcatgctgaacgcccagtctatcatgcgtaaccaaaaccgctgtccgtcgccggtttgttcgctgtcagacacaacaatgtcgtattcgcttagcacccattgaaagaaggattgtggtaaaccacttataacccgctgatggacagcgcgtggcgtacgccacaccatgacctgtgtcgcagcaccgtgggggaacgtaatttctttatgaaacgtcagcttgaccgcatacgccgtatagggttttccgtcctcggtggtcacgagacggtattcatcgccgtagcgcgattttaacaagcgatatcccacaggcagcataaatccgggcagatgaaaatccaccgtatcccgcgcaagaaacgcttcggtatgttcgacgtttcgggagataaggcctaatttttggctgaaatctgcgatatcaatcatcagtggcgacatggtggtttctcatggcgtgagtatagacgacttaacacccccgtcgaaatgatgtcgattcagtgatgggtttaagttaacccccacattacgccagtcttctccacttagcagagacggctcttattccctgaaagcccctcgcaaaaattatttcccctgcgccgccagccacgccatcgcccgctcccccgcctcatccaccggcagatacaccagcagccgcgatccgtttcgcggcgcggaataccagtacatctgctgcagcgtaaaatcccccagctcgggatgggtaaacagcttgagctggttctccacgccgcgcacgtcgttgcgctggtgccacagggttttaaactcttcggacactgcaaagaagcgcgccagcttggcctcccaaagcggatcgccccggtgttcggccatcgccgcgcggaaataggagacaaagatgggcagcacgtcgtcgcgtctgccgaggcgcgcgcgccacgccggatgcgtgaggaacagataaatacagttgcgatcttcgggagggatgtcattgaaatcgacgcccatcagatgcccgaagctgtcgttccacgccacgatatcgaagttcggtttctgaatgctggcgggtttcggcatcagcgtatccagcaggcgtcgggtgccttcgctaatgccctcgcagcagaccgcctgcggcgcttcacccggcggtaaacctgctaacacaaacaggtgccgggcctcggtcggggtacattgcagcgcttttgccacggccgccatcaccgcgctggacggattgacgtccctgccctgctcaagccaggtgtaccaggtgacgcccacatcagcgagcatcgccacctcttcccggcgcaggcccggcgtgcgacggcgaccgctgcgcggcaaacctaagcgctgcggatcgagactttcccgccgggcgcgtaaaaatgccccaagctgttttcgggtgtcatcctgacgtgaaacgaccggttcagacatcagcgccataaatccccctgcatggtagtgccagtaccagtataagtaagaactggtacccgtttatctgatggtagatgctacgaccatctgttgaatgacgcaatggagttaccatgaatacgtcagttgtttcaccgggtcgcgctggcctgatattgctgttaaccggccagatgctgccgatgattgatacctcaatcactaacgtggcgctggacgccatcacccattcactgcatgcgaccgctaccgaactggagctcatcgtcgccctctacggcgtggcctttgccgtctgcctcgcgctcggcagcaagctgggggataactttggccgtcgtcgtctgttcatgtggggtgtggcgagctttggcctggcctcgctgctgtgcggaatggcggggaacattgaacagctgctcgccgcgcgcatcgttcagggcgcgggggccgcactgatcgtgccgcaaattcttgccacgctgcacgtcacgctgaaaggcaccgcccacgccaaagccatcagcctgttcggcggcatcggcgggattgcgtttatcgtcgggcagatgggcggcggctggctggtatcggcggacatcgccgggctgggctggcgtaacgccttctttatcaacgtgccgatttgtctggtggtgctggcgctgagccgccgcttcgtaccggaaacccgtcgcgagacgccgtcacgcatcgactggccgggtaccgcgctgctggcggtcatgctttgctgcctgctgttcccgatggcgctcggcccccagtggaactggtcgtggccgctgaagacgatgctgctcgcccttgtcccgctggcctggctgatggcgctaaacgcgcgcaaaaaagagcgtgagaatgcccacccgctgatcccgccgcgcctgcttgcgcttcgcagcgtgcgctttggcgtcctgattgcgatgctctttttcagcgcctggtccgggtttatgttctgtatggcgctgaccatgcaaaccggtctggggatggcgccgtggcagtccgggaacagttttatcgcccttggcgtgacctactttgtttcggcctggttcgcgccgcggctgattgcccgctacagcaccagcacaatcctgctgacgggtctggcgatccagattactggcctgctggcgctgatcgccacgttccgcgtttggggcatggagaatacccccctgacgctggcacccgcgaccggactggtgggctacgggcaggcgctgatcgtgaacagtttctaccgcatcgggatgcgcgacattcagcctgacgacgcgggagccgcgagcgctattttaagcaccctgcagcaggccgcactgggccttggcccggccatttttggcgccattttgctgcacgcgcttcaaaaccatcacggggattacacccaggcggtgaacgtcttcctgatggtggaaacgaccatgatggtggtacttgctctggcgacgctgcgtatccgccatagcctgtgcctgccggtggcgaagatctgtcaggccgccaaataagttcgtgaatttgcataatagatccgcagcctccattatggggctgcaaaaatacaggagacgttatgcaggaattgattgctcaggttgaagagttaggcattgaaattaatcacaccacctctttagtgattatctttggtattatttttcttaccgccatcatcgttcattttattctgcacaaaggggtacttcgcgcattcgaaaagcgcgcgcaggccagcagccatttatggctgcagatcatcacccagaataaattatttcaccgtctggcctttaccctacaggggataatcgtcaacgtccaggcggtactgtggctgcaaaaaggcagcgaagcggcggaaatactcaccacctgcgcgaagctgtgggtgatggtctatgccctgctctccttcttctcgctgctggacgtgattttcaatctgtcgcagaaaatggccaccgcgtcgcagctgccgctgaaggggattttccagggcatcaagctggtgagcgccattctggtggggatattgattatctccctgctgattggccagtccccggcgattctgatcagcggtctgggcgccatggccgccgtgctgatgctggtgtttaaagacccgatacttggacttgtagcgggtatccagctttccgccaacgatatgctcaagctcggcgactggctggagatgccgaaatacggtgccaacggcacggtgacggatatcggcctgaccaccgtgaaagtgcgcaatttcgataatacgattacgaccattccgacgtgggcgctggtctccgacgcctttatcaactggagcggcatgtcggcctccggcggacgacgcattaagcgcagcctgaacattgattccaccagcattcattttctcgacgagcaggagcagcagaaactcattcaggcgaaactgctgaagccttatttggccgcacgccatgaggaaattagcctctggaatcagcagaacggtgaaggggaatcggtattaaacctgcgcaagatgaccaatatcggcaccttccgcgcctacctgaacgaatatctgcgcaaccacccgcgcattcgtaaagatatgacgctgatggtgcgccagctcgcgccggacgcgaatggcttgccgatcgaaatatatgccttcaccaacacggtggtctgggcggaatatgaggagattcaggccgacatcttcgaccatattttcgcggtggtggatgaatttggtctgcgtattcaccagtcgccgacggggaatgatattcgctccctgacaggcgttattgccagataatcaggtgctggcgcgggaaataaagcgccagtccatcatcaccctttccgtgggcgcgtccgggttgtcgattttgtttaagagaagatcgaccgccttgcgcccgatatcccgcgacggctgttcgatggtggtgagcgaaatcatgtccgccagctccgtaccgtcaaagccgaccacggcaatatcctccggcacccgaagacctgcctgctgaatggcgcgcagcgcgcccgccgccagcgtatcggaaacggcaaataccgcatccggcggattatcttttaacaggttttgcatcgccgccatgcccgcccaggagctgagatcgctggcatactccaccgcctgatagtccagatcccgcatgtggatcacgctcttgtagccgcgttcgcgcaggcgggcatatttgtagctgagatcgtggttgatcatcgcgatacgcttgcggccgccgtcggccagctggctgacggcatgctgtgaagcgtccacatcgttgatgccgacgcaggagaccgcacccgcatcggcatattcggcgcactgcacccacggtgcagaaccaatcagcgcggcaagttccggcagcttcgagaaggcgtccatggtgataatgccgtcgacgattttgccggagagcaggcttaagcccgagcgggagcgctcgatgtccgagccggagttgcacagcagaatgcggtagccgtttttctccgcctcggcttcgatgcccttcaccacttcggcgcagaacgggttggcaatgttggacaccatcaccaggatcatatagctgcgagcggtgcgcagctgacgggcgagcaggtttggctggtagttgctctcctgaatcgcccgcagaacgcgctcgcggtttttcgccttcacggtgtcgctgttattcagcacgcgggagaccgtcgccacggagaccccggccagctgagcgattttctgaattgacatagcgacgacacatcctgcggttagcgttttgtgcaggctaccataaatttattgcccggcgaaccgggcaacgcgttattgttccacgcgcacccagcgctgctgctgatggcttttcacaatggcatcaatgatatacatcacgtttgcgccatcgtgaaacgtcgcaaactgcggcgtatccggcatcgcgcccgcctgcacggcgcggtagaactgcgccatcatatttttgaaggcgtccggccagccttcgatatgtccgccggggaagtgggcgctgtcggccacgtcagggttcatcaggcccggatcgtcggtgagcgtctggttagcctgcgcgcgatggccgatccacagctgctgcggcacctcctggtcccacggcagcgagcgctcgctgccgttgatctcaaacgtcaggcggtttttacgcccggcgctcacctgcgagatgctaaagcagcccttgctgccgtcgtcaaagcggaacagcaccgagccgaagtcttcggtcgtgaccggtttgtctacatactccgcctgctcgtcgtgggagaaggtttgattcccgaccttgctggccctgcgcgtcggccagacgatggataaatcagccatcacctcggtaatgcgccgcccggtgacgaactgcaccgtgtcgcaccagtgggagccgatatccgccaccgcgcgcgatgcgccgccgagcgcggcatccacccgccagttgtagtcggtttccagcagcatccagtcctgtaggtagctgccgtgtgaggcaaaaatccgcccgaggctgcttgcgcgcatcatgctcgccgcctgacgcaccatcgcaaactggcgatagacaaagctcacgccatgcaccacgcccgtctgctccgccagcgccaccagctcgcgcgcctcctcagggatcatgcacagcggcttttcggaaaacacgtgcttgcccgcgcgcaggatctggcggttaatctgtgcatgcaggtggttcggcgtgcagttgtgcaccacgtgcaaatcagggtgcgcgagcagctcctcaacgctgccgtacgcgtgcggtacgtttagcaggcgcgccttttcctgcgccttaacgagcgagccgtcgcacagcgcgaccacctgaacaaacccaaggcgcctgagcgcctcgatatgtgccgggccaataaacccgctgccgacgatcccgacgttaatcatggctgccccctgcggcgaaatcgtcaaacgcgcgcccggcaaccggaatgatgtggcggcggataaattcgctgccttcactcgccccggtatcgccatccttcaggcagcactcccactccagcaccgcccagccgtcatagtcgtactgggtcagcttgccgaaaatgcctttgaagtcgatctgcccgtcgccgggcgagcggaagcgtccggcgcggttgatccacggctggtagccgccgtacacgccgctgcgcccgttcgggcggaactccgcatccttcacgtggaacgctttaatacgcgcatggaagatgtcgataaaggtcagatagtccatctgctggagcagcatatggcttggatcgtagagaatgttgcagcgcggatggttgtccaccagcgcaagaaaacgctcgaaggtgacgccgtcgtgcagatcttcccccggatgcagctcaaagcagacgtccacgccctgctcgtcgaaggtatccagaatcggccgccagcgggtcgccagctcctcgaacgcctcctgaaagcgctgctcgttatgcggcggccacggatagaaaaacggccacgccagcgagccggagaaggtcgcgtgcgctttcagacgtaatcttgccgaggcgaccgccccctgcttcagcttctccgtggcccacgcccgacgcgcagcatcgttaccgcgcacggaagcgggcgcaaagtggtcaaacgcggcgctgtaaaccggattcaccgctacgagctgcccttccagatgggtcgacagttcgctgataaccagcccgtgcgcggccagcttagcggcgatgtcgtcgcagtaggtctggctctctgcggctttctcgacgtcaaagatgtgcggatggttgcaggggatctgcacggccttataacctttacctgccgcccattcagccagcccgtcgagcgaattaaacggcgcttctgcgccaataaactgcgacagaaaaatgccgggtcctttcatcgtcctcataccacctcctgaacgttacgccttgtcatcgtcatacttaaacgtgagaaggaaaatcagcgcgatcgccgcggccgctaccgccgggatccaccagaatgtcacccacgcctgcggcacggtctgccctgccaccaggcggttatagagcacgccggaaatctgcgagccgagcagcatgccgatgccgtaggtgaacatcacgatcatgctctgggcctggcctttcaccttttcgcccgccacgcggtcggtgtagataaagccgacgacaaagaagaaatcgtagcagacgccgtggagcaggatgccgagatacagcaggatgcgcccctcctcgctgacgcccagtgcgaacatggcgtaacgcacaaaccacgccagcatgccgatcagcagcatgaccttcacgcccagacggcggaacagcagcggaataaccagcatgaagacgatctcggacatctgcccgaaggacatggcggtgctgacgtcggcaattcccgcatccgccagatacgaggcggtgtaggcgtaataggtgccgagcgggacggagatcagcattgcgcagacggagaagacgaaaaagtggcgggttttgagcagcgcaaaggcatccgcgcagaaaagatcgcgcaccttcaccggcaggcctttcgccggagcaggcgtgtgcggcagcgtcaggctgtaaagcgccagcagcacggagctggccgccgccacctgaaagatggtaacgctggacgccacgccggtgacgccgatgaaaatgcccgccacgatccagccgatggtgccgaacacgcgcaccaccgggaaggttttatccacgtttgccaggctgtgaaacgcgatattgttggtcagcgccagcgtcggcatgtagcagagcgtgtagccaaacagcaggccaatcagcagcgcgccgttctcggcaatcagcgcccccggcacgaaccagaggatcgccgcgcccgccaggtgcatcaccgccatcaccttctgcgaggcgaagaagcggtccaccagcatgccgagcacgaacggcgagagaatggaggcgataggcccggcggagaacgcatcgccaatcagcagagacatgttgtgctgggtcatcaccaggcctagcgtaaccgaccagctaccccatataaaaaactgcagaaacatcatcagcgacagccgcggcaccagcagccgatgctgcgctatcgccttttcactactttcagttgacaccatgataagcctcacccggaaaaaagtaatcgattacaaaacaactcaaatgaaaagtaatcgattacaaaataaagatcctgtggatcgtagaagatttgggaggggggtcacgataaagatgaagctgtgttttgtaggcccggtaagcgcagcgccaccgggcgtgaaggcaggtgcggtctggtttggtgcggtctgttgccctcaccccggccctctcccacagggagagggagaaaaacgggctactttttgcgtgagagcttaaacgcgataaacaggaacaccacccataccggcagcagcattgctgaaagtcgcatctcatccatggtgcacatcagcaccagaatcaacgccaggaacgcgatacagaggtagttccccgccggatagagcagcgctttgaactgcgtttcgcgccccttgcggcgcatcgcggcgcggaatcgcaggtgcgcgaggcagatcatgatccagttcagcagcagcgtagcgacaaccagcgccatcagcaggccgaaggcctctttcggcagcagatagttgatcagcaccaccagcgaggtaatcgccccggaaaggaacagcgagttcaccggcacgccgcgacggctgacgcgggtgaggaatttcggcgcgttaccctgcacggagagaccaaacagcatgcggctgttggagtaaacgccgctgttatagaccgacagcgacgccaccagaatgacgaagttcagcgcagaagccaccacgttgctgttcagatcgtggaaaatcatcacgaacgggctgctgtctgacttcacttccacccacgggtagagcgccagcagcaccaccagcgagccgatatagaacagcaggatacggtacaccacctggttaaccgctttcggaatgcttttatgcgggtcgcgcgcttccgcggcggtgatgccaatcagctccagcccgccgaaggagaacataatcaccgccaacgagaggatcagccctttccagccggtcgccaggaagccgccgtgctgccagaggttatcgatcgtggcgcgctcgccgccgtgaccagagaacagcagccacaggccgaagccgatcatgccgataatcgccagcaccttgatcagcgcaaaccagaactcggtttcgccatacaggcggacgttgacgaggttaacggcgttaatgatgatgaagaaggccgccgcccagatccacgtcgggacatccggcagccagtactgcatatagatgccggcggcggtcagctccgccatccccaccagcacgaacatcacccagtagttccagccggagaggaagcctgcgaacgggccccagtatttataggcaaaatgcgcgaatgagcctgacaccggctcttcaacgaccatctcgccaagctggcgcatgatcaggaaggcgataatcccggcgataccgtaacccagcagcaccgccggaccggccatctgaatagcggggccgatgccgagaaagagcccggtaccgattgcgccgccaagggcaattaactgaatatgtcgattttgcaaaccacgttgcagcgtcggattctgatccgacgaggcttcagcgctaccatggcctgaagcggatgacgcgtctttcacgtcctacccctgtctcttttttagaaggggcacgttttaacacttcatgctggcggtagcaagtttaacgccgggagcacggcatgcccccggcgatgcaaggttatgagccgatgatcccgccgtccgctttgacgatgaccaccgttgaggaacgcgggcgtccgttcgggttcacgtctggccagttggaaacagcgcgagggttagcagggtcggtgatatcatccccgccctcccccggatgctgaatgttgatgaacagcgtccggttatccggcgtaaacgcaatcccggtgatttcacacccgcgcggtccggtcaggaaacgacgatactcgttggtgcccggaatggtggccaccatctggttattgcccatcccctcgtaggctttcttattgatggtgctggaagagacgtcggtctggatccacagcacgccctgatgatcgaacgacaggccatcggggctgccgaaggccgccccctgcatggaacctttagccttcggatcgtcgctgtcggtccgcccgcccatcaccagaatatcccacttaaagcgagcggcagcaggatcggccccctcttcgtgccagtgcataatatgaccaaacacgttattagcgcgcgggttggcggcatcaaccggtgccttaccctccttcccgcgatcgctgttgttggtgagcgtacagtagacgctgccgctggcgtgcgggtcgaccgctatccactcggggcggtccatcttcgttgcccccacggcgtctgccgccaggcgggttttaatcagcagatcgccctggttttcaaacccgttgctcttatccagacccttttgcccgaagatcagcggcagccagtcgccgctcccgtcttcgttgaagcgggcaacgtacagcgtgccggacgtcagcagctgcatattggcttcacggttcgcgggatcgtattttttgtccgagacaaacttatagatgtactcgaacttctggtcgtcccccatatagaccaccacgcggttatcggcggcaagcgtgacggccgccccctcatgcttgaagcggcccagggcggtgtgcttgcgcggcgtggaggtcgggttatagggatcgatctccacgacccagccgaaacggttaggttcgttaggggttttatcaacgctaaatcgctcgtccacctcgttccagcggtaggattcatcgctgtcgctgatcccgtagcgtttttccagcgggttgagatcggtttttttgacaaaaatatccgaccagttctcctcgcaggtgagataggtgccccatggcgtatggccgttggcgcagttctgcatggtgcccagcacgcgctccccctgcgggtcggcggcggttttcattaagtcctgatgccgcgccgggccggtaagctgcatcggcgtattgacggtgatgcggcgggcatacgaagacgggcgaaccacctgccagtcgctgcccgattttttcacttccaccaccgacacgcccatcgcgttctgccccttgcgggccttgtcgaggctccagttcgccgtaccgtcggtaaacagcatcccgttgtcgatgtactcatggttcattgccagcaggccatgctccgggttttgctccccttgcggcaggctaaaccacgccatgccgtcatgatgcatgcccgcctgcgcagcctgttcgtccgcggtgttgctggcatccggtttaaaggccggcatgttgtttttgatccccgtcgggtcaccccagcgatagaacgggcgggcaatatagccttccggcaccctgaccgtatcttcggtggagacgtcgatgctggtaaagcccagggaaaccgcttttgccagcgcggaaggcttcgataccgcggcaatggcgttctcaggtttgatcagaaacgggaatgaaacggcagcgcccgccacggcgcccatctggagaaaacgacggcgggagaggaacacctctgcaacctcggagaataccgggttcgcgctgcggttagcgatgtcgtcgcgatgttcttttttaaaaacggatttgaggggtctgcccatagcggcttcctgtcattggccaagaggtaaggagtcggcgaccagtctaagaagcttttattacaattttataacacaacggcggaggtgtggggcgtccctgccccggataacgaggtggaacgcttagaactcgtagccaagcgagaccttaaaggtacgcggctcgccctgcgtgatgtaggtgccggaatcgtccacgctggcccagtagttttcattggtcacgttgtcgatgcccgcgcgcaccgtcatctggtttgcattgtggttcaccgcgaagcgatagcgcatccccagatccagcgtggtgtagctgtcgagctttttggtgttggcaagatcggcgtactgcgcgccagagtggttgacgcgggcggtcgccgtcaggccatcaatcggcttgatgtcatactctgcacccagcacggcgtagacgttcgggacaccaatggcatcgttgccctgatttacgccgtttttggttttggtcagctccgcctgcagccaggtggcgctggcgttgaggcgcatcccgagcatcggctcgccgaagacgttcagctccacgccgcggttacgctgctcggcgtccaggccgtagtgattgttgctgtcgaggatcgccgacggcatcttgatctcaaacagcgcaagcgatccgcccacgcggccaaagtccgccttcacacccacttcgttctgcttagagtgaacgataccggtgctctggccgtagttggtggcggtgttaggcgcggttttgcccggctgcagcgcttcggtgtggttggcgtaaagggaaatttcttcccacggtttgtaaaccacgccgtaggttggcatccagcggctgccgtcgaagccgtctgccgcgttttccgcaccggtaactttgttatacccgcgaatgaccaccttctgatggcgcgcgccagcggtgaacagcagtttgtcatccagcacgcccagggtatcgctcaacagccagccctgggtgcgggtgcgcccgctggtcagcggatcgctgtacttcccgcctgagccgttgaggttggtgctgtccggcatatcgacgccggtattgtggtagatgttggtggtcgggttatccttcgtcgccgacattttccacgcgatcttttcatttttggtcatcgccgaatagccaacgttgaccttgtgcgagacgaagccggtattgaaattaccgcgaatgcccgccatgccgctgacggaatcgctgatgcggttggtatcaaggcggctgaccattgctttaccgcttttatccagcagcttcggcgcgctgtagatcccttcctcgtgcgcgtgctgcgcgccaagcccggtataggcggtccagccgtcggtgatgtcgtactcgctgcgccacatcccaaattcgttttcgatgttgctgtaggcccacttctgcgagaagttacgatcgtttttcggcggctcgggcacgaaatccaccgccgaaatattgacgctggtcgggctgccgtggaaggtttttttctgatagcccagatccagcgaggtgcggaaacggtcgcctttgtaatccagaccggtggagagcagcgtggtgcggcggcggtcgttcggtatgccggtttccccttcgcggtggaccaggttcacccgcgcgccaaactggtcgctgtcgccgtagcgacggcccgcatccagcgtggtgccaatctgggagtccgaggtgtagtcgacgcccactttcgcctgcgggagttcgcccgcgtgttttggctcaaggttgatcatcccgcccacgcccgagctcgccgcgccgttcatcagggcgtttgcccctttgaagatctcaatgcgctcaaccatctgcgtatccaccacctgacgcggcagcacgccggacagaccgccaaaggtcatgtcgtcgccgtcaaacttcagaccacggatgcggtaggtttccgcgctgttgccgtacccctgaacgaactgtacgcccgcgtcgttggcgatcacatcagcaatggttttcgcctgctgatcttccaccagcttcgaggtatagctgatgatgttgaacggcacgtccatggcgttctgctgaccgagcatccccatacgcccgccgttcgccacctgtccgtcaaggaaggccggtatcagctggtcgccaccgggtttgaaatcgctggccggtgcagagtgcacaacgagggtatcttctttttgatcgtccgccgcgaaggcggaatgcgttaccgcgccaacggcgagcgccagcagcgttttgtgtattctggtgttgttcatcgttaactcatttgaaagtgcgcgcaaaaatagcccgttgtcaggccttagaatgtattgataacaatgcaaatgagaactatacgcattatccatgtgttagcaagcgtaaccgcgaacaacaggaagaggtggggagacaggatgaggaacaaccaccccaaaatggggtggctgcagtaacgttattttttcttgtagatattagccgtaccgtgaattttattgttggtgttacctgaggtgagcaccagaacatccgcgccttgcttatcggctttctcaatcagttctttttttgcatcatcaaccgatacttcatttgaggtgcttaccgtaccgattttttgatactgagactcgactttcttgaactcatttttagtcagcagttgggcagcaaaagcattggtcgtaaacagtaacgccgttcccaacaaaatagcagtcgtctttttcataacctttttccttgagattaatcagcaactacgaaaaacctcacgcatgatggtgaggttttatgagcatggtagagaatctcaggaaatgccatatattctggaaaattcttttataacaacccattgcatgaaattattaatgaatattaagaatagtcgaatacacgcgcggtgccagcaatatcaatgcgaaccgccgtgcccgggttccatccaggctggctgacggtcttgagggtgacgggctgcggctgtccggtaagcccaagggtgagcgtcgacaggtgaccggtaaaatccacatcaagaatggagatcgggctttcatgtgaggcgcatgccgtcacgctcagctgctccgggcgcagcatcactctgccctgccctgtcgccagcgggttgtctgtgggcaccttacccagcgcgcagagggcgtagcccgaggtgagctgcgcaggcaggatcagcgcatcaccaagaaacagcgccgtctcttcgtcaacgggacgggtgtaaacctcataaggcgtcccgacctgcgtgaagcgtccggaacgcatgacggcaacctgcgtggcaaaggagagcgcttcgttctgatcgtgggtaaccagaatcgaggccacgcccgcttcggccagcagatcggccgtggccttacgcgtcatcgcgcgcaggccggtatccagagccgagaacggttcatccagcagcatcagtgaaggacgctgggccagcgcacgggcaagggccacgcgctgctgctgtccgccggaaatctcgtgaggccagtgcgtggcgagctgcctgtccagcgaaaccatctccatcagcgcctcaacgcgctggcgtttttcgtggcgggtcccgtccagcccccaggcaatgttgtctgccacgttgaggtgcgggaacagcgcgccctcctgaggcacaaaaccgatcccgcgctggtgggcagggacaaaacggttttcatcaaacagggttctcccctgcataacaatacgaccggtgtcaggcgtctcaaacccggcaagaatacgcagcagcgtggttttacctgaccccgacggtccgacaatggccgttctgctccccggcgcaacgctcaggtttaagctgtcgagcacctgcacatcagcaaacgatttagaaatggcggttaattcaagcatgtcatagccctgcaattttcttcgactgcatatagagaacggcggtcagcgggagggaaatcaggatcatcagcatcgcgtaaggcgcggcggcgacatagtcaatttcgctggtcagcgcccagaacccggtagagagcgtgcgcgtgcccaggggagagagtaacagcgtggcagtcaactcgttgctgacgccgaggaacaccagcgcggcccccgccgccgcacccggcgcggccagccgcatcgtgacgctccagagcgccttcgcgggcgtgcagccaaggctgcgcgccacgttttccagctcaaccggcgcctgcgcaatccccgcccgcaggttgatgagcgcacggggcataaacatcagcaggtaggcaaggaacagggtaatttccgtctggtaaatgggacgggcgtaatgaatggtgacggtgaccagcgccagcgccgtgacaatacccggcagcgaactggtgatatagatgcacccttccagcatccggaagatacggtgcgggtagcggataccgagccacgcaatggggatcacgcacgtcgtcgtcagcagcgcgccgcccacgccgagcatcagcgtctggcgcagcgagtgccagagatcggcgctcatccagttttccaccccgccgagccaaatccagcgacacagaacagctaacggcacgcccagcgccaggacgatcagcaccatgaaaaacagctgccccagcgcggcagccgcaggcttcagcggccagcgtttctgctcgcgcgcagccccggcgccaatgcgcgcgtagcgtgcttttccacgcgtcacgccttccagcaccaggatagcgaggcagcacaaagccagcacgcccgccagcatgtttgctgccgggccgctgaaggttgactgaaactggtcataaatggccgtggtgaaggtatcaaagcggatcatcacgtacagaccatattccgccagcaggtgcagcgccaccagcagcgcgccgccgcagatagccagcttgagctggggtagcaccacgcggaaaaagaccttccacggcggggtgccgagcgacgcggcgacatcttcgagcgtcgggtcaaggcggcgaagcaccgccgcaaccggcatgtagataaagggatagtaggcaagcacggagagaaacacgcccgcggagagcccgtgcatcgacggaaccacgctcacccaggcatagctttgcacaaacgcgggaatggccagcggggcgaccgccagcgcggaccagatgccccgtccggcaagctgggtgcgctctgtgagccaggcaatcgccacgcccgtcacgatacacagcggaaccgccagggccgtcagccacagcgtgttgctgagcagctcagccacacgcgggcgaaacaccagcgccttaatggtttcccagcccgtctcaatgccaatggcaatgataaaacccaaaggcagaagcgccagtaatgaaaacaagacagctaacgcaaccatcggcagtgcaggacgcctgcgggcaggctcctgcactctgttttttccgatgtcgagacttagaccagacataagaccttcacttcactctcaggatcacagcaggccggcttgcgtcatcagctcgataacttttttactgttgagcgttgaaggttcaactttcggtgcatcaagatctttcagcgggaccagtttcgggtttgaggccgcgttcacgcccacggcgtattcaaaggcgttgttggtacgcaggctttcctgaccttctttgccggtaatgtatttgatgaaggcctgcgcctgcgctttgtgcttgctggacgccagcacgccaccgccggagaggctcacaaacgcgcccgggtcctggtgcttaaagtagtagagctgggtgtttttgctgttttcaccggttttggactgatcgacaaagcggtagtagtggtaaatcaccccgccatcaatctgaccggcattgaccgctttcatcacggtgctgttgcctttataggccacgaagttggctttcatcgccttgagccactccagggtggcctgctcgcccttcagggccagcatcgcgctcacgatagcctggaaatccgcgcctgacggtgatgccgcccagcggcctttccactcgggtttcgccagatccatcagcgatttaggcagctgctgttcgctcagtttcgccgggttatagacgaacaccgtgctgcgggcagcaatgccgatccagcggccatgcgccggacgatactctgccggtacctgcttcagggtgtctgaatccagcggggcaaacaggttggcgttatccaccagcaccatggacggcgagttttccgtcaggaacacgtctgccggcgatgcgctgccttcctgcaccagctggttacccagctcgctgtcatcaccattacgcaaagtgactttaatcccggtttctttggtaaaaccgtcaacccacgacttcaccaggttttcatgctgcgcgttataaataacgataccgtcgttgttatcggcggcaaccgactgtgtggaaaggaaaagggatgatgacaacaaggcaagcgagaagcaggacagcaggcgagaattcatgaacatatccttaatagaccaacgggagtaaccactcatagctttgtgggacaggattaaagcatacaacaacgctaatgataattagtatcaatccagtttacgcgtaaaagtgtaaaatttctttttagccgattttgtaatgataaaaatccaaattttaatgcgagataatttctagattaagaaaaccttaagcctgctaacaacgaaattcattagccttctattcattatggcgcgaaggtaaatctgttattcgcgcgcccggcagatataaaaaagccccgatagtgcgggggctttttatgcttatccggaggtagctaaatttatttggctactcatttaaaaagcctcacatagccgcatgaggggcatacacaggataggtgaagaacaataaatgcacgcagttcagcccaaaatggaataacgttgcaacccagagcctgccgctccacatccacgccaggccgtaaataatgccggagaggctggcaaaaataatcagcagtaaaccgccgctataatgcatcagcccaaagaggactgaggccatcaacaacgcgacaacaggatgaacgatccgggacaagcgctgctgcaggtagcctctgaacagggcttcctcggccaaagagacgaagaaaatattcgcaagggcaaattgcgcgaaccattctggcgcatgtggctcaattctcagcccgcccaacgccacagccagaagtaacagcgcgggtaccgcaagcaccaatattacccagccgagcttgccaattttatagaggggttttgctacgaatagcgttggcatgcacgtaattaaaaagaacggcaccaccgccttgtccatattaaagtacatactgaacggtatgctttgcggaccaacgacgacagcatccagcactttgggattatggaagcccgggagtacatgcataaccagggtaacggcgatgatcacacacaggccttcaatcagataagtatatttatgaaccttattacgtagccattcaacagcagaccagccaataacgattgacgcaataaccagcagcgccggggcgtcaagaatgctctggttccagccgagaaatgccgttaatcccagaagcaggtaagccaggcttttattaagggaaagtgcggcaagcgaaattgcgagtagataccacataaatgtccttcatgaccgataaattttagggtcgatgtcccaaatatgtcccacaacggaaatcaggaggatgtgagtgaggcgtaactctatgaaatgaaatggcacgccctgtaggattcgaacctacgacctacggcttagaaggccgttgctctatccaactgagctaagggcgcactgagaagcgtgtacttcgcggtggtgaaacgcgaagaattatacggtcaatggcaggtgagtcaatgccttttccgttttcagggccaattaccgctagccgattgtaaatacggctattttctcaacattcctccctgttttaccgtaaaatttagcgctgcgaaaaggcttagttgcatttaagtaacgcctgctgttttcctgaacgtcagctcgtcacactagagccaggtatcccggccgcctggaggctgacagacaacaggacaatggagtgacagcgcaaaacctgatcgatacgcccccccggttacagtacctctctcaggacatcgtcggcattaagcttgagcctatcgtcgccctcgcctctttgcgtcaggttggcgtcgaggtccttagcgtcctggccgatacgcggcacagtgaggattttttttgcgatcggtccgctggctggtcgctaacgctgcttgaggcgcagcttgctgcgttaaaaaatacgccgcacggacataacctttttattaatctgccgataaccgtcctgacagagcctgcgtccttccagcggctcatcagactcccctgcgtgccgctcaatattgagtttgtcgaccttgcggcttttttggcgctgtccgtcgcgcagaagcagcgcgtggttcagaatctccagcagctgagcagacaggggcacgctatctggctggatgacattgatgatgtcttagtgcagtcgtttttatcctgtcgacttccgttaagcggcatcaaaatagataaggaagcattctggcgtttacgcgacacccctgcgctgaggcaactggtttccctttgctttcagcttgccgggaaagtgcttatcgaaggtattgagactgaacgcgatcgtacctgggcactgcaggcaggcgcagacctcggccagggatattactggccgtcctggacatggccggaggattaaaacgccatttccaggagggagaccatgcgaatgacagtgcgccgttaccggcggcggcgtacaggaagtgatgcactgggatttacgcgctcaccttttgctcccccctttttcgaccggctcgaatttttgagccagtccatcagccagccccgcaaaacagacgccccgtttattctcctggtgacggaggatcatttcctgcgcaccggttttctcaacgggcagtttcccctgagcagctgctgcgattacgccacgctggacgacgcccttgtcgcacagacccaatggccctccgcccgtctggtcgtggatattgaaagccggtcaacggggcttctggagaaactggatcagttgagaaggcatagcctgtttcctccgttcctgacgccctggctgttagtccgggccgataattacgacacccgccttttctgcaaagcggcaggtccctttcatgtgcttgagcgccagctgaacgccgcggcactccagcacagcctgctggatgcccgcccgccacagggctccgacaaagactggttcaaccgcaatgaatggccgatcctgcaggaactttcccggggcaagacgttacgtcagattgcccttatgcagaatcgtccctatagccgcattatctatcgtcttagctgcatcctggtgaagctggggctgagtcatcgacaggaattgttgcatcttcttaataacctctcagactgcacgttttcactcacgtcctaaccccttatttcctaaagcgctttaagaatttacttaccattcgtgtttcaaaaatgttaatttttaacaataaagtcaaaattataactattcctaatttatgggcgagaaccttgtgaaatgccacaaattgaacgaacggcagcactttcctccatccgttaagtgaatgcagacagcgttaacaagatgataatgatgtaaaaacaagcagcttagcgactgcgccctggagggaaaagcgaagcagatagcatgttctcctgtgcaggagttgcggagctgaaggtcaaccttcacgctttcagatgaaggtctgacggcctgcgagggcaattgttcacctcatcagaccgggcgagtcccccaaaatgatgcgtgtttttgttaacaattgatcaacatacagagatatctgttattttttgttattacataaagatgaaaatatgcggtaaatgggataacaggatatttccgctaaatttaaaaaaatagcgattcagatccagaagataatacaaaccaatatcctgtgattaatttacagggttttcggaaaaaacttaccctgtataataagaagcgtaccaaatctgaataagaaaaacctttttgccaacaccagccaaatgagatgaccgcgctgaggcatagttcttttcattacgtaaacaaggatgctttcgctctttccagggaaatactacggtatagggatctgcacattatatccttccggcatttcgagagttttaccaaactctgcataacgcttttaacaatctgaggcattaaaaatgaaaccggcatccgttatcattatggacgaacatcctatcgtcagaatgtcgatagaagtcctgctacagaaaaataagaatatcacagtcaagctcaagtctggcgatagccatgaagtccttgactgtatccgtaatcaccctatcgatctggtgatccttgacattgaactcacgggcacggatgctttcgctttacttaagagaataagaaacttaaacaaagacattaaggttctgttcctctcatctaaatcagagttattttacgcaggtcgctccattcgcgccggggcaaatggcttcgtcagtaaacgaaaagatttgggtgagatctacaacgccgtagaaatgatcctgatgggctattcctttttcccatcggaaacgctgaactttataaaccatttgggttcagggaaagggatggcagtcgatatgccattatcaaatcgcgaggtcacggtattacgctatctggcgaatggattatccaataaggaaattgctgaacagctactattaagcaacaaaaccattagcgcgcataaatccaatatttattccaagctgggcgtgcaaagcatcgtggaattaattgattacgccaaagcgcacgagctgctttaacctgaattcactccctgcagcttatctgagctgcagggagtgcggtcagtgctaattatagttaatcataaaggtggcatccgcatcggctcgtccgggctgagggttatctgcagtggcaatataattggcataaaacgacaatgttgcattcccctgcgcatcaaccgagaccggctggctggcctgctggagagccagacgcgttttatccgcatccctgatctctaccgcgacacggctcgctgtactggcgtcgttcagcgccagcaaaccgttattgctcccgtcggatttacccgaaaacgttatcgacgcggcgcccggcggacagccggtcagcttcagcgtaaacggcatgggctgcgtgcggctcccggtggtgctgagctgtttcgtgggccaggtgcccagcgtgacggtcttgtcgctgtcgctaccttccgcgacgcaggtaaaatcgacaatattgccggacatctgaatattgatctcgcccagtgctgtcgctgaccacgcgttggtctgaaacatcaccagcgccagcgcagtaacatgtcctttccagttccgcatctctcccccttaatcgtaatccacgcggagatagccgcgagaggtgaaccggccttctgcgggtttattcccggtaatgcttaccggccagacgcggatccccacctgcgcctgtgcactgtcatccaggcggaacggaattttgctgttcaggttgttaggcgtcagaggcgtgccgctatcgttcgccaccacaaatcccagatcggggttatcggataccagcgcattgccagcgattttttccgcctcgatacgcatcgtcagatacgcattggcctccacgttcgtacacttaatggctatggttttaatttgtggcgagactttctggggacggtttccggcacccgcctggctgaacaacgatgcgccaatatcaccaaaatcaaactccaccacctgcccggcatttatcgcgcagctttgtggcacctgaatggtaccgctatagctgatggtatacaccggcgtattcagggagtcagatggcgtggtggtcacatacacggtgaacatggtttgctgagggatcaccaccatattgataaaccgtcgggtgactctcaggcgaaagaccagctttgagtcggtaaccggaaacgctttgttcttcggaacgttagggtgctcccccatctggatgtagttcgccggcggatagaacgtccccgcgaagtcatcgtggatctgcatcgcgccatcaagatagtcattgagcttcacatacttgtagctatcaatcaccgtcgttatcggcagactggtgacgtagctacgcatggtggacttgcctgtcgtccctctgggacatatggcattcacgccgaccagcccagacttttgcgccagggtcacaatctgcccaggtttgttattggagctgttaaaaacgtttgagagatcgtaggagatatccttcgccaccccattggcgttctgacaaatcgttgcccaagcgggcatcgcgctgcacagcagcgcaaagctcattacgttgcgtaaaatgcgcatctttggatccccgttaacgatcacagcaggcccccgccatggtaatggcctggttctgactttgaggcgataagcgatagtgagcgcgacactgggactgcgccccgtcgccccactggatcagcagctcgccctccagcggcagcccgctcaggtaaatttgcccgtcgtcccccaccatgctggtgaccccgctttgcgtttcgcggaccaccgcaccaaacggcacgggctggttgccgcgcgttaccgtcagcagggcgcgcacgccaatgcgggtatcaaagctggcgcgcaccagcgcgcctttggtcggcaccacgctgctcacgttgttttcgatgtcggtgttgttgctcatggtgttggtatccagcgccacgcggttgtagcggtagacggtggcatacggcatcaccgcatagcctcgccagtcggttctcacgccggtctggttttccacgctgacgccggatgtccccggcgctttgatcagcacgttggtgtcgcccagcggctggctgaaggtcacgccgtcggcatgaccgacgaccccgccggagagctgccagttgagatcgtgctgatcgtcgctgtagttgtagcccacgcccaatgtgccgtaggtcgcctgccagttggcgctggcgcttccgcttgacccgttggtgctggtgtgtccctgggtcacgctgtagttcaggttgcggtcttccaacagcgtgccgctgacgccggtttgccagctcgtgtcgccatcgctgttccgactggcggatgccgtggcgtaggccctgtcgatggcgctgtcccggcgatagccctgacgggtaaagatactgaacggcacggagacgttaaacgacgcgatccggtcggtgccgtcgatcccgacggatttgttccacgaccacgaaacggagtagttgatccccttcatgccccccgcataccccagctggtaccagaggttcgactcgtcggtaccccagtaggtctgctcgctgccggagatatagaccgagccgtaatcccccagcgactgagaaacgttaagctggaagcggccttttttattccacgtcaggttgtgatagctctgcacgtccggcacatcgttatcgtcctggctgtcggcatactgatagccttccattgagcgccatgccacatcgtccagggtgtaaaacccttttgtggagtagcggtagcccagcagctggaagttggtgccaaagccgttaagggatttcgcatagaggaagcgcagggactgtccttcatgcttgctgtcgtccgcgagctggctgcgggcgtgggtgatatcgagcgaaaccgcgccccagtcgcccaggttttttccggccccgacggcaaccgcggtatagcgtgacgccagctgcgttccgccgtagagcgtaaagccgttgacaagcccggtaatcagggtgccctgggtgaagaacggcgtatcctgatcgctgttaccgctgcggtaatcccccgcgacgaggtcatacttccagcgcccttcacgctgcagaagcggcacggtggagtacggcacggtatagcgctgctgggtaccgtctttctcttctaccgtcacttccaggtcaccgcttgaggaggtggggttgagatcggtaatcgcaaatgcgcccggctgcacatagctttgatagatcacgtagccattctgacgcaccaccactttggcgggcgtccgggcgatcccgcgcaccgtgggcgcgtagccctgcaggctgtccgggtacatgctgtcagacgagaagagccgtccgccgcggaaccccatgctgtcgaagacgtcattaccggtattgctgtcgcccaggaccagttcgcttttcagcgggatcacggtgcgctgcgcccaggtgccaatattctgccactcgctgtgccgctgcccgttggtctgcgtgtatccccatgcgccgttgttgcgcaggcgccaggcgccgtagttcagcccgctctgcaggttgaggtaatagctgtcgtcttcgctgccccggttgcccgtaaagctgtagttcagcagcgcggcggggatgccttcatcccactgttccggcggaatgtagccccgggcgctgttctgcaatgccacctgcggcaggctgacgttcaggcgctgtgaggcaaagttgaataccgtttcgctgccgggaatggccgtggtcaacgggacgcaggcctcaccctgaacctgagccagctcgggaaacgccgcaacgttgacgccaaagcggtccagcatcgcgcgcgtaatacacggcgatagcccgcccgccaccggcggcgtgttctccgcctgctcaaaacgcacgtcctgagtcccgataaattcatcgttacgccagatatccacgcgataaacgccgggtgcctgctggtgtccttgttcaaaacgcgacaaatccgccacgctggcggtgtcgtcggacaggaaggccgggttgaaatagctttcgctccagccagcctgcggccagagcgcagccatcagcgccagtgcaaccgggcagtaacgtccctgatggtttttcatcgccctgactctgctcacaggttgacgctacgcgccggcgtgatggcaccgtagtcattcacgctctgccaggagagcgtgccgccggcaccggctggcagcacctgctgtgccgcgcttttcggcgccaccatcaggttatccagcgtcttcccgcccagcttcagattgacgagggtgatgtaatacggagacgcgttgctgactttgagatggttacccgcgcgctcaaaccgcagctgggaaagcgcctcttccggctgcattgccaggttgttcgggcgcacaaacagcttgatgcgcgagaggatagccagctgcagcacgttattgttttccgttttggctttgttcactgacgggatcgctttcacgttcatataaaacagcgattcacggtcggcaggcagcgcaggcccggcgtaaataatgcgcagcgtgttttcactgtccggctcgctaacaaacaggggcggcgtgacggcaaatgttttttctttttgcccgttcgcattttcgatccacgcgttaattaaatagcgctcctgtttattgctgttggtgatcgccagcgacgtttgcttcgcgtccgccgggtaaataacgcgggtggctcccagcgcaataccgccggatgcattcgcgcaggcagaaaccatcattaaaataaacgataaaaaaagtcctggtttaattagggtattcatcacaaccgtacctttaataatgtgttcgcaggtgttatggataaatcaacgtaaaccagacatccgactgaattttgcctggctcgaggtgttcggaaatagcccgatagcgggcgctaaaatggaacgccagctcgcgggtatcgatcggcagccagctgacggccgtggcatttgggataatctgacgctgctgctcgtcaaagagcgccagcccaacgccgctactgacaggcgtttcacctggtcgcgatgtcgccagaaagacctgaggatcttctgcgggtgtggccccctgaaactggatccccacggtgcgcgaaacatcaacgctgcagtccagcagccgtacggtgaaaggcacattcaccgtggaaaaactgcccacgccggaaaatgaattggttcggtactgccccatatcgatgcgcatattctggctgtcgggcgccacggcgcagccgccgttcaccagttcacctctgagatgaaccttgccgccttcgatcaccacggtatgcgccgatgccgggcaagccatcgcaagggttaacagcagtagtgttcctgtccttgtcatcctttgttcctggcaatagcgtatgacgggcctcgtccctgaggcctgaacatccctgtgcggaggaattattcgtatttcataacgaaggtggcgtcagcgttcgcctggcctggctcggtagtcgcagccgtggatttataacgcgcggtgaacttcagggtgttggtcccttcgatcagcgtctgcgcagcagagaaggtcgcaccgtctggcgtcagaacgctggatttgctgtcgaggatctcgatacccacgcctttcgcggtgttgtcgttgctgccggaggtgacggccagcagggttttgtcggttgggtcgatctgaccggtgaacgcaacagcggcagttttggccaccagcggatcgcaatcgttcagttcaatgttgaacggaatattagaggtggtgtcgcccactttggtgaatttcgcggtacgatactgacccagattaacggtctgctcggaagaatcagtatttactgaacaagccgcattaaccagctcacctttaaaatgtacggtaccgccatttacggaaaccggcgcagcaggatccgctgcatttgcggcacccgcaaccagggccaaagttgcaataacagtagaagcaatgttgctgagtttcatgtctattcctttaaaatgtaaataacccttcccgcgaaaaatcgggaataagaaatacgttcaattgagtaattgaaagcttatttcggaggagacaaagtagctcaggaggtgatttttaaatatgtcaaaacgctgccattttaccaggtcacatcctaatcccgcctaagaaaatgaccatcccttaagaagggtttttgcgtcttgcggataaaaacgcgcaaagggtgactgacagcggggctcgcttctgacaaaatacacgcatcccccctttcgaacgttacagacggaatcttctctctgatggcagcaaagattattgacggtaaaacgattgcgcagcaggtgcgctctgaggtcgcggaaaaagtgaaggcgcgtaaagcggccggaaaacgcgcccccgggctggccgttgtgctggttggcagtaacccggcatcgcagatttatgtcggcagcaagcgcaaagcgtgtgaagaggtggggttcgtctcccgctcttacgatttgccggaaaccaccagcgaagcagaactgctggaacttattgacactctgaatgccgataaagagatcgacggtattctggttcagctgccgctgcccgccggtatcgacaacgtgaaggtgctggagcgtatcgcaccggataaagacgtggacggcttccatccttacaacgttggccgcctgtgccagcgcgcgccgcgcctgcgtccgtgcacgccgcgcggtatcgtgacgctgctggagcgttataacatcgatacttacggcctgaacgccgtggtcatcggcgcgtccaacattgtgggccgcccgatgagcatggagctgctgctggccggctgcaccaccaccgttacccaccgcttcaccaaaaacctgcgtcaccacgttgagaacgccgatctgctgatcgtcgcggtcggtaagccgggctttattccaggtgaatggattaaagagggcgcaattgtcgtggacgtcgggattaaccgtctggaaaacggcaaagtggtcggcgacgtggtgtatgaagatgccgccgcgcgcgcctcttacattacccccgtaccgggcggcgtaggcccgatgaccgtcgcaacgctgattcagaataccctgcaggcatgcgaagaatatcacgacgtagaggacgcgtaagatggccacattttcattaggcaaacacccgcacgttgagctgtgcgatctgctcaagctggaaggctggagcgaaagcggcgcgcaggcgaaaattgccattgccgacgggcttgtcaaagtggacggtgcggtggaaacccgcaagcgctgcaagattgtcgcgggccagaccgtgagctttgaaggccagagcgtgaccgtgacggcgtaagccgtttgatgcccggtggcgctgcgcttaccgggcctacgtactgtctccgtttgtaggccgggtaaggcggagccgccacccggcaatttctttctctatcccctcacacccatcacggttatttatcgatccacttcaaataatcagtatttcgtctgttgaaaagtgaaaattcagttgcgcgtttttcacgctttgcccacgataagtagaacgttctactaaaacgttctacttacaataacagcgccaaaaaaagcgctactcgggggaaatcagcatgagtctgatatcagggtttgttaaatcgctgtctaagttatcgatgattggtcgcgccttaatgctgccaatttcactgcttcccgctgcgggcctgctgctggccttcggcgataagttccatctgccgctgatgatgaacgcgggcggggttatctttgataacctgccgatgctgtttgccattggctctgccgtgggcctggcgtcagaatccggcattgcggcgctgtccgcggcggtgtcggtgtttgtcaccaatatcaccatcagcaccgtgctgagcatcacgccggaaatggcctctcagggcgggaaatacgccatggtggtgggcattccgacgctgcagatgggcgtcttcggcggcctgatctgcggtattctcgcggcctggtgctataaccgcttccacaccatgcagcttccggaattcctgggcttcttctccggcaagcgcttcgtggcgattgcaacggcgttcctctcgttcctgatggggctgctgctgccgtacgtgtggcagcatatccaggccggtatcgacgccctctccgtgatcgttaacggcgataatcaggcggcctcgacctttatcttcggtctggtggagcgcgcgctgatcccgctcggtctgcaccatatctggtatccgtcgttctggtattcgtttggggattacaccacccaggcaggccaggtgatccacggcgaccagaccatctggttcaagatgctggaagaaggggtgaaatccttcagcagcgacacctaccagaacgccggtaagttcatgcagggtgaattcccgctgatgctgttcgcgctgcctgcggcgtgcctggcgatgtatcacgaagcccatacgaagaataagaaaatcgcggccggtattctgttctccgcggcgctgacctgcttcctgacggggatcaccgaaccggtcgaatttacctttatcttcgtggcgccgattctgtacgtctttaacgccatcatggcgggtctggcctacatgaccatgtacctgctgcatgcgcatatcgccaagtcgttctctgcgggctttatcgactatctgtcattcgggatcctgccgtcgtttaacggctaccagacccacttcctgagcgccattatcatcggcattccaatgggcctgatttattacttcacgttccgctttgtgatccgtcgtttcgacgtgaaaacgccgggccgcaccgaagtaaccgccaatgcggatgaaaaatcggattccgagctcgcgaccgagatcatcaccctgctgggcggcgcgcataacattgactccgtcggcgcctgtatcacccgcctgcgtctggaagtggcaaaaagcgacgcggtggataaagacggtcttaacggactcggcgcgcgcggcgtggtgtttgtcggcgacaacggcattcaggtgattttcggtgccagagcacagtttatcgcccagaccatgtccaccatgatcggcaaataataagatgcctgaacgacacgtctcctgtacgctgggaggcgtgttttatctggctgataatcggtaaatttcagggagcggttttgaagaaagtcagcattattgatgtcgcgaagcacgcgggcgtgtcggtttccaccgtctcgctggtgctgcgccagaaagggaaaatctcagaggcaacgatcgagaaggtcaacgctgccatcaataccctgggctatgttcataacgttgccgctgccaacctccgcgccaatacctctaatctgattggcctgatcctccgcgactttagcgacagcttctccatcaaggtgatggcgagcattgttcaggatcttgaaaaacagggatatatggtttttctcggtcagccccagaacgaccatgaccagcttgagcgctgcctgctgtcgtttaagcagcagggcgtcgccggggtgatctatctggcctcggatacccgcaccgccaccctgccggaaaagattcgccactgcccgctgccgctggtggtggtctctcagtcgctgctggatgaaaaatgcaatctggtgatgcgcgataaccggcaggcggccagtctggcggtgcgttatcttatcgagcgcggtcatcgtaatatcgcctacataggcggacgggaaggctgccttatccgcgagcagcgcctgctcggctttcgcagcgcgatggcgcaaaacgggctggtctggcgcgatgaatactcgccggcctgcagcgatgacacgctggcagcgggttttgccacccgccagctgctggaaaaaaacaataccatcaccgccctgctctgccactcgccggatgccatgatcggctccatctccggtattcatcaggttgggcgtacggtgggtaaagatgtctttctgacgcagcaggtcgccctggtcggtttcgaagatatgctccacgtgaacctcacctcgccctcgtttacttacgtctcgtccgccagcgaagagacggggcgtcaggcggccgggctgattattcgcacgctgaaggagccgacgctgcaaacccagcgtattacgctctccgggcagcttatcgcacgcgagtcggcgtaaaatcagaatttcgcacaggttttttagcgcggaatgactgctatatttccatgatttgccatggataatcacaatgcctaccgttattacgcacgctgctgttccgctttgcctgggcttaggcctggggacaaaagttatcccaccccgcctgctgtttgccggtattgttctcgccatgctgccggacgccgacgtgctggcgttcaagttcggcgtcgcgtacggcaacgttttcggccatcgcggctttacccactccctgctgtttgccttcgtggtgccgatactttgcatattgactggacgacgatggttcagggccagcctgacgcgatgctggctgtttttaaccgtgtcactgctgtcgcacagcctgctggattcgattaccacaggcgggaaaggcgtcggctggctgtggccgtggtcggatgaacgcttctttgcgccgtggcaggtgattaaggtcgcgccgtttgcgctctcacgctataccacgccgtacgggcatcaggtgattatttcagaactgctgtgggtgtggctgccgggggtcgtgctgatggggttgctgtggtggaaaagaaggtaaaaaaaagccgggtggcggctgcgccttacccggcctacttttgcctgttggcccggcaagcgtaagcgccaccggacgttacagacttacttacggcgccaggtcgttccctgcgggccgtcctcaaggatgatgcccatctcggtgagacggttacgcgccgcatcggccgccgcccagtctttcgcctgacgcgcttccagacgcgctttgatcaacgcttcaatctccgccacttcaccgtcgtccgcctgcgcaccgctctgcaggaacgcgtccggctcctgctccagcaggccgagcacggcagagagcttacgcagatgtgacgccagcgcattcgcggccgccatatcctcggacttcaggcggttcacttcgcgcgccatgtcgaacagcacggagtaggcttccggggtgttgaagtcgtcgttcatcacctcaacgaagcgtgcttcgaacgcttcgccgcctgccgccggaacagacttgtcggttccgcgcagcgcggtgtaaagacgctccagcgccgagcgcgcctgcttcaggttctcttcgctgtagttcagctggctgcgatagtggccagacatcaggaagtagcgcacggtttccgcgtcgtaatacttcagcacgtcgcgcacggtaaagaagttacccagcgatttcgacatcttctcgcggtcaaccattaccatcccggagtgcatccagtagttcacgtactcgccgccgtgggcgcaggtggactgcgcgatttcgttttcgtggtgcgggaacatcaggtctgaaccgccgccgtgaatgtcgaagtgcttgcccagctgcttgcagttcatcgcggaacattcaatgtgccagcccggacggccgtcgccccacggggatggccagcttggttcaccctctttagacatcttccacagcacgaagtccatcgggttgcgcttcacgtcaaccacgtcaacgcgggcaccggcctggagctgatccagatcctgacgggaaagcgcaccgtaggttgggtccgtcggcacggagaacatcacgtcgccgttgtcggcaacgtacgcatgtccgcgggcgatcagcttctcggtgatgtcgatgatttcgtgaatatggtgggtcgcgcgcggctcgctgtccggacgcagaatattcagggcgtcgaagtctttgtgcatctcagcgatcatgcgatccaccagcgcgacaaagctttcgccgttttcattcgcgcgcttgatgatcttatcgtcgatgtcggtgatgttgcgcacgtatttcagcttgtacccgagaaaacgcaggtagcgtgacaccacgtcgaaggcgacaaaggtacggccatggccaatgtgacagagatcgtaaaccgtaataccacacacgtacatgccgacttccccggcatggataggtttaaattcctctttttggcgcgtcattgtattaaagatttttaacatcgaagattccatgtaaacacgtgtgtggttgaaaaccggctattctacccgtaattcaaacccgaagcagcacacaatgcaaggtgatcgcatcctgtggttatgctataacaagcccctatagatgacccgaaggcgggtcgacgtaccacaataacggaacaggatgcaaaaatggttactttccacactaatcatggcgatatcgtaatcaaaacctttgatgacaaagcgcctgaaacagttaaaaacttcctggactactgccgcgaaggtttctacaacaacaccattttccaccgcgtgatcaacggtttcatgatccagggcggcggtttcgaacctggcatgaaccagaaagccactaaagagccgatcaagaacgaagcgaacaacggcctgaaaaacacccgcggcacgctggcgatggcacgtactcaggcacctcactccgctactgcacagttcttcattaacgtggcggacaacgacttcctgaacttctccggcgaaagcctgcagggttggggctactgcgtattcgcagaagtggttgaaggtatggacgtggttgacaagatcaaagccgtctctactggccgcagcggtatgcaccaggacgttccaaaagaagacgttgtgattaccagcgtgaccgtcagcgagtaattggtggcgacactctttattgcggatcttcatctgcaaacagaagaaccggcgataaccgccggttttctgcgttttttacgcggtgaagcgaaaagcgccgatgcgctgtacatcctgggcgacctctttgaagcctggattggcgacgacgatcctaacccgctgcaccgtgaaatggccgccgccattcacgcgctggtcgattccggcgtcccctgctacttcattcacggcaaccgtgatttcctgatcggcaagcgctacgcccgtgaaagcggcatgacgctgctgccggaagaacaggtgctcgacctctacggccgcaaggtcctgatcgtgcacggcgacacgctctgcaccgacgataccggctacctggcgtttcgcgccaaagtccacaccccgtggatccagaaggtgttccttgccctgccgctctttatccgcaaccgcatcgccgccagaatgcgcgcaggcagtaaagccgccaacagcagcaaatccatgaccatcatggacgtcaatccgcaggcggtcgtgcgggtgatggaaaagcatgacgttcagtggctgatccacggccatacccatcgtcctgacgtgcattccctcatcgccaacggccagcccgcacaccgcgtggtattgggtgcctggcacaccgaaggttccatggtcaaagtcacgcctgagggcgtggagctgatcgcgtttccgttttaaccccctccatatcattctatttttttgaacaatatcggcaaattgtttcgattttaatccgcccgtggtcggcctattatttatcacatcagggcaacacgccctatcccagacaaaacacttaaggaatacgaccatgaaatccatcaaaactttcgttgcagttgcggctctctccctggtttctttcggttctttcgcgcagagcgtgagcgcaaccgcctctacccttgaccgcgcagaagcgaaaatcgctgcacagggtgcgtcttataaaatcaccagcgcgaaggtcgataatcgcgtgtatatgaccgcagaactgacgaaataatgattgcccctcgacgaaaacagaccgccagaaagcggtctgttttgttatgaactgatggcaacaacagctcaagatttaaccgcgcaaccgttttccttgcccgtataacatgctattctctgtgccctcgaaagcagtgtgtttcgcaccacaggagttttaagacgcatgtcttcccgcaataatccggcgcgtgtcgccatcgtgatggggtccaaaagcgactgggctaccatgcagttcgccgccgaaatctttgacatcctgaatgttccgcaccacgttgaagtggtctctgcacaccgtacgccggacaaactgttcagcttcgccgaaagcgccgaagagaacggttatgaggtgatcattgccggtgcgggcggcgcagcacatctgccgggcatgattgccgccaaaaccctggtgccggttctgggcgtaccggttcagagcgccgccttaagcggtgtggacagcctctactccatcgttcagatgccgcgcggtattcctgtcggcacgctggcgattggcaaagcgggtgccgcaaacgccgccctgctggccgcgcagatcctggcgacgcacgataaagacttacatgaacgtctggcggcgtggcgtaaagcccagaccgacgaagtgctggacaacccggacccgcggggtgcggcatgaagcaggtttgcgttctcggtaacggccagttaggccgcatgctgcgtcaggccggtgagccgctgggtattaccgtctggcccgtcgggctggacgccgagccagaagccgtcccattccaccagagcgtgatcaccgccgagattgaacgctggccggagaccgctctgacccgcgagctggcgcgtcataacgccttcgttaaccgcgacgtgttcccgatcgttgccgaccgcctgacgcaaaagcagctgttcgacaagctcggcctcgcgaccgcgccgtggcagctcctgtctgataaaagcgagtggaacgacgtcttcgccatgctgggcgagctggcgatcgtgaagcgccgcgtgggtggctacgacggccgcggccagtggcgcctgcgcgcaggcgacaccgccgagctgccggatgattgctacggcgagtgcatcgttgagcagggcattaacttcagcggtgaagtctcgctggttggcgcgcgcgggcatgacggccgcacggtgttttatccgctgacgcataacctgcatcaggacggcattctgcgcaccagcgtcgccttcccgcacgccaatgccgaccagcaggcgcaggcggaagagatgctctctgccatcatgcacgaactcggttatgtcggcgtcatggcgatggagtgctttatcaccccgtccggtctgctgatcaacgagctggcaccgcgcgtgcacaacagcggccactggacgcaaaacggcgcctccatcagccagttcgagctgcacctgcgcgccattaccgacctgcctctgccgcagccggtggtgaatagcccgtcggtgatgatcaacctgatcggcaccgatctgaactacgactggctgaagctgccgctggtgcatctgcactggtatgacaaagaggtccgcgagggtcgtaaagtcggccacctgaacctgaacgacagcgacacgggccgtctgagcgccacgctggaagccatgatcccgctcctgccgccggaatacgcgagcggtattgtctgggcacaatctaagcttaaatagttctccctccgccggggagttgacctcctctttccccggcgtacaattcccgcccattgctgcttagctttcttctggaataaccatgaacgatggaacggactatcgcgcgatcctcgcgtccgatacccctttaatcgacgttcgcgcgccgatcgaatttgcccagggcgcgatgccagcggcagtcaacctgcctttaatgaacgatgacgagcgcgccgccgtcggcacctgttataaacgtcagggaccggacgccgcgctggcgctcggccatcgcctggtaagcggcgacacgcgtgacgcccgcatcaacgcctggcgcgaagccagccttgcccatcctgagggctttctctgctgcgcgcgcggcggccagcgctcgcatatctcgcaggcctggctgaaagaggcgggtgtcgactacccgctgatccgcggcggctataaggccctgcgccagacggcgattcaggtgaccattgagcagtcgcaaaagccgatggtgcttatcggcggctgtaccggaaacggtaaaaccctgctggtgaagcagcacgcgcagggtatcgatctggaagggctcgcgcaccatcgcggctcgtcatttggccgcacgctcacgccgcagctttctcaggccagctttgaaaatcaccttgcggttgagctattgaaaaaagacgccgcgcgctgggtgctggaagatgagggccgaatgattggctccaaccacctgccggcctgcctgcgcgaccgcatggttgaagcccctatcgtggtggtcgaggatccgtttgacattcgtcttgaacgcctgcgcgaagagtatttcgaccatatgtgggcggatttttctgccgcctacggcgaggaagcgggctggaaagaatacagcgagtacctgcatcacggcctgttcgccatacgccgccgtcttgggctgcagcgctttgcggaatttaccgcgctgttagactccgcgctgctggaacagcaacgctctggccgcactgacgcgcacttcagctggcttgtaccgctcctgaacgactattacgacccgatgtacggctatcagctggagaaaaaggcggaaaagattgtgtatcgcgggacgtacgaagaaattgctgagtggcttgatcgctgaaaaaagccgggtggcggctacgccttacccggcctacgcgtactgttgtagccccggtaagcacagcgccaccggggaacagacggcttagaagtcgtaacgcagacgcaccaggttcatgtcgcccaggttgtcggtgctggaggtgaacacgtgttcgtaatccacgcggaaaccgtaatccagctggaagctgatccccacgccgttgtcgatgcgctggtagttacggccgttcacgtactcaatgcgatcacccatgaagtaaggctggatggatttcaccgcgtactgaccgactgggaacttgtaccctgcgaagtattcaataccccacgcgtcgcccgcaaagtagtcgttaacagacacttttttggtggtcaggaagttctgataccagccgccgcctgcggagaaggtccagttgtccggggtccagctcagcgcggtaccgagaatgttctggtcgtaggttttgctgtcgccgttgtccgggttacgcatgtcggcgcgggtgtagttccacgcggcgccccaggtcaggtcggtagtcaggtggtaatccaggcccagcgagccgccgcctttacgcttgtagcgcaggccgttgcccggcaggtattcgctgtcttcaaacaggtaggatgcataaatgtccgcatcacccacggttttcttatatttcagcatctggcgtgaacggtaagagccgtcgtaatcgccgttgatcccgttacccggtgcctgaccgatcatgtcgtagtcccagatatcggttttcgcgccaaccacatcatagtaaacgctgttctgttgaccgaaggtcagcgtaccccaggtgtcgctcttcagaccggtatagagcatacgacgcgtggtgtcgtgtgcgccttcggcgtagtggtgatcccagttaaactgcgcaggaatattcacacccagctcgtagtagctgatccagctaatgtcatcaaacaggtagtaatctgctgcgaaacggaagcgggtgccgccgtcaaagccgttacgcttgtagctgtttttcccgtcgtcgccggtcatgttctggaactgaggacgaatgctgccgccaacggtgaagttcaggcggctcagcgggttacccgcctgaggatcctgcttaagaacggtgatttccgcctgagaagcgaaggtcgttaatgccactgccgcgccaatcgttgccgccagcgctgatttttttatagtcattatttttccttaatagacacgctgctaaatatttagcgggtgaatattaactggaaataatcgggctatgtggacgggtttttaatgttttgtgctactaaatgagtgggtattatcactttgtgctatttaaacactacgaaccggcataaaaatccggtgcgtaattatcaccacactaaatcaactcgcaaactgacggaacagggctttgccctttagcagccgcgtgccgagccagcctccgcagagagaaagcagcgcagcgccgcacagaggcagagtcaaccaaagacgccagtcaggctcccacgggaagtcgaagacctttgtctgcagcaccgccagcgccgtctctgcgccaatggcggccaccagaccggccaccagccccagcagcgcaaactcgctccagagcgtcattcgcagcagccgcttaccggcccccagcgtgcggtaaaccaccagttcctgatggcgctggcgcatgcccacctgcacctgggccagcagcaacagcacgccgcagatcgtcaccagcaccaccatgacctccagcgcgcggctcacctgctccagcacctgccccacctgtttgaggatcgcgccgatatccagcaggctgaccgtcggaaactcccggttgagctgggtcagcatgccgttgccgttttcccagcggaagctggtcagccagctctgtggctgcccgtccagcgcccccggcgggaagataaagaagaagttgggccgcaggctttcccagtccactttacgcaggctggtgactttcgcggtgaaatcctgggtatcgccggtgaaggtcacgctgtctcccagcttcacgttcagccgcgtcgccagcccctcctccatcgacacctctcccgcttttggcggccaggtgccggcggttatcgggttgtgatcagggcgtttatcctgccaggtgaggttcagctcgcggttcagcgactcgtccttattcccctccgttggctggccgttgatctgcgtcagacgcgcgcgaacgatgggatagaacgattcggggatgatgtgatgctccgacaggaagcccttcagcggcgtaacctgctcaggggcgatattgatcaggaaatagttcgggctttccggtggaagctgctgctgccagcggtcgagcagatcgccgcgcagcaccagcagcagcgccagcagcataaacgacagcgagaacgccgacagctggctgagcgtagaccagggctggtgcagcagacggttgaccgccaggcgcacgggcagggattttaccgtcacccttttcaggaggttgagcagtatccagcccagcacgccgcacagcagcgccagcacaaccgccccggccagcaccgcccacagcagcgtgctgccgcccatcagccacgccagcagccccaccgccaccgcaataatcaccggaaggtagaacttcagcggccagacgttcgccaccacatcgttgcgaagcacacgcaacggctgcgtggcgagcagcaggcggtagggccgaagccccaccagcaccgagatcaccgtcatcgcgcccatcgcccacagccacggccagaggctggccggcggcaaggcggccgggagcaccggtttcagcatcaccatcagcagtttttcaaacagcagccccattattccgccggtcagcgccgacagaaccagcagcatcagccactggccgacgatcagcttgcgcagctgcgcccggcccgccccgagggttttgaggatcgccaccaggtcgtagcggctgcggcagtagtgccccatcgccacggccaccgccgccaccgccagcagcagggtcaacagggccgacagcagcaggaactgctgagagcgctccagagatttaccgagcgccccctcgtcctgctccagcccgtaccagcggtgttccggtttgagctgcggcagaagccatttttcatacgcggcaagctgggcgggcgtgccgccaaacttatagcgccaggtgacgcggctgcccggctgtaccgcatgggtggccgcgacatccgcggtgttcatcagcagacgcggcgcaagctggaacgggttaaatccgccgtcgggctcctgcaccacttccccggcgattttcagcgtggcgtcgccgacgtcgatactgtcgccgggtttgaggttcagcagcgccatcagacgcgatgccagcagcaccgtaccgggcgtcggctttaaccccggaggactggtctgtaagtcaccgtacatcgggtagatatcatcgacggccttgacgctcgccagctgcggcatgtcgcccgcgaaggtcatggtctggaaggtgagctgctctcccaccttcagcccttctttgcgcgctgcttcaatccagcccggcggcacggggcgggagctttccagcgccctgtcccccgccataaactcccggctctgctggctgagccctttttccatgcggtcgctgacgctgccgagcgccagcacgcaggccaccgccaggctgagcgccagccagacaatcagcagcgagggcgagcgccactcgcgccagaaccagcgggtaatcatgcttcctcctgcagaacaccgttcaccagccgcaggcgacggtcgcagcgcgccgcgagctgcggatcgtgggtcacgaggataagcgtagtgccgtgctcgcggttgagcgaaaacagcaggtcggcaatcctgtcgccggttttacggtcaagattgccggtaggctcatcggcaaagagcacctcagggcggccgttaaacgcgcgggccagcgccacgcgctgctgctcaccgccggaaagctgggcgggaagatggtcgagacgtttccccagaccgagctgttccagcagcgccttcgcatgcgcgcggctttcacggctgttttcaccgcgcaacagcgccgggagctcgacgttttccagggcgttcagggttgggatcagcataaaggactgaaagacaaaaccaacgtgacgcgcgcgcagcgcggcccgcgcctcttcatcaagctgatgcagcggctgcccgacaaggtggacctcgccgctgctgccgtcgtccagaccggctaaaatcgccagcagcgtggacttaccggaaccggattcgccaatcaacgcgatggtttcagcgcgtttgacaacgagttcaactccagtaaggatggaaagctcgtgttccccctgaccgacggacttcttaagatgatgaacttcaacactgttttccgctggcatttgcccttcctgtttttgattctgatgaccttccgcgcggcggcggcggacacgttactggttctcggcgacagcctgagcgcaggctatcgcatggcggctggcgcggcctggcccgctctgctcaatgacaaatggcagagcaaaacgcctgtaatcaacgccagcatcagcggcgacacctcacagcaaggtttatcgcgcctgcctgcgctgctcaaacagcatcagccgcgctgggtactggttgagctcggcggtaatgatggcctgcgcggtttccagccacagcaaacggaggatacgctgcgcaccattttgcaggagatcaaggcggcaaacgcccagccgctgctgatgcaaattcgcctgcccgccaactacggtcgtcggtataatgaggcctttagcgcgatctaccccaagcttgccaaagagtttgatattccgctgctgccatttttcatggaagaggtctatctcaaaccccagtggatgcaagacgacgggatccaccccaatcgcgatgcgcagccgtttattgccgactggatggcaacgcggctggctcctttagttaaacatgactcctgattaagcggagatcctgacaggtaaagttatgcaaaaatcggtcttaattacaggatgttccagtggaatcggtctggaaagcgcgctcgaattgaagcgccaggggtttcgggttctggcggcctgtcgcaaacccgacgatgtcgaacgcatgaacgggctgggctttaccggcgtgctgctggatatggactcgccggagagcgttgaccacgccgccgatgaggtgatcgccctgaccggtaatcgtctttacggcctgtttaataatgccggttacggcgtgtatggcccgctggataccctctcccgcgaaacgctggagaagcagttttcgaccaactttttcggcgtacatcagctcaccatgcgtctgctcccggccatgctgccgcacggcgaagggcgcatcgtgatgacgtcgtcggtgatggggctgatttccaccccgggccgcggcgcctacgccgccagtaaatatgcgctggaggcctggtccgacgccctgcgcatggagctacgccacagcggcattaaggtcagcctgattgaacccggcccgatccgcacccgctttaccgaaaacgttaaccagacgcaggcggataaaccggtcgagaaccccggcatcgccgcacgttttaccctcgggcccgaggcggtggtggccaaagtgcgccatgcttttgagagtgaacatcccaaaatgcgctatccggtgacgctggtcacccacgccgtcggctggttaaaacgcctgctgccgggccggataatggacaaaattttacacggttgagttgaagcgacgacgcgcatccccatgtaaagaacaaaccgacaaaagagaaagccgcatgtccgtacagaatatcgtcaatatcacagaagctaacctgcaacagactcttgaacagtcgatgaccaaaccggtcctgttctacttctggtctgaacgtagccaacactgtctgcagctgacgccggtgctggaaagccttgccgcccagtacaacggtcagttcattctcgcaaaactggattgtgacgccgagccgatggtcgcgtctcagtttggtctgcgcgccattcctaccgtctatctgttccagaacggccagcctgttgatggcttccaggggccgcagccggaagaggctatccgcgccctgctggataaggtgctgccgcgcgaagaagagctgaaagcgcaggaaggcatggcgctgatgcaggaaggcaaatacgacgaggcgctgccgctgctgaaagaggcgtggcagctgtcaaaacagaacagccagattggcctgctgctggcggagacgcagatcgccctgcaccgctcagaggacgcggaggccgtacttaagacggttccgctgcaggatcaggacacccgctatcaggggctggttgcacagattgagctgctgaagcaggcggcggataccccggaaattcaacagctgcagcagcaggttgccgacaatccggcggatgccgcgctggcaagccagcttgcgctgcagctgcatcaggtggggcgtaacgaagaggcgcttgagctgctcttcagccatctgcaaaaagatttagccgccgcagacggtcaggcgcgcaagatgttccaggagatcctggccgcgctgggcaccggcgacgcgctggcgtcgaagtatcgtcgtcagctttacgcgctgttgtattgataaaaaagcccggtgacggcttcgccttaccgggcctacaaagacgatgttaccccgtctttttcaactgcgtcaccaccagctggtgacgcgcgttgtagaacttccgataggtcaggtagcaggcaatgatggtcgacaggcttgccgtggaaagcagcataaacgtcaccatgatctgatacttaatcgcttttaccggatcgataccggcaaaaatcagccccgacatcatgcccggcaggctcaccagccccaccgttttggcggaatctaccgtagggatcagcgatgagcgaatgctctcgcgaatcagccgcgccgaggccacttttggcgttgcccccaggcttagtttctcctgcagctgctgctgttcgctgctgaaacgctggccgaggttgttataacaaagcccaacggccaccatcgcgttccccgcaatcatccccgagatagggatgacctgcatcggcgtaaactcaatcgagccggagagcaccagcaccgccagcgtgagcgccgttccggtggtaatcgcaataaacgatgagacaaacgccttatcaatgtatttactgcgcttttgcgcattccacgccgcgttaaagcagataaacagcaccatcagcagcgtcagcaccgcgtggttaacgttgaagatatacttcagcacatagccgacgatgatgagctgaatcaccgcgcggcagatactccacacgatatctttttccagccccagcttttcccggtagctgaccacaatcgcaatcagcaccagcaccatcgaaaaggccagcgattcgttcgtaatgttatgctcacccacggtttgcctcctgcattttcccgccgtgcggctggagcgtgattacgtcatccgcatgggttatttcgttagcgtcgtgcgtcacccacagcacggcaatgttctgctcccgggcgtaacgatgaataatctcgttaacgttgcgcttgttgacgtcatcgagcgcgctggtgatttcgtccagcaacaacaccttcggtaaaaactgcaggttgcggatcagcgagacccgctgcttttcgccgcccgacagcgcgttgatggatttgctcagcgtctcctgcgccaggccaaagcgggccagatcctggataaacttttccggctccggcattttattgcggatttgccacggaaaaatgaggttgtcatagaccgtatcgccaaaaagcacgggcgtttgcacgcagtacgacacctgctggcgatagctttccggggaaagcgaggcgatatcttcgccttcaaacagaatggcgccctccgtcgggctgaggagtgacgccacaatcttcagcagcgtgcttttcccacagcctgagggacccgtgattaatttaaactcgcccggcgacaggctaaacccgacgtgctgcaggatcgtgttttccccgactcgaaatccgacatccctgagaagtaattcgttttttttatcgttcattgcgcttccgttgaccgctttttgtcataaccgtctgtagcataatcctttcgcccgcgcagcgcgaatagcctcacgctgaagcaagtgttaagctttttgtttgtaaattgtcaccaccatcactacaggaagtatgcagcatggcacatattttttatgagtttccctccctgaagcctggtgttcctgatgtcgaaacattaatggacgtcatcaaatcgtcggaactcacgcgttttgtgatgggtgaagaggtggtggactttgttaagaaggcgctcatcgtgaacaccacgatcggcagcttcaaaaattgctattttgccttcgacaacgggacacacttccttgaatttgacggtaaaggcaaatcaaaacgcttcaatgaggtgccggactggttcgtctctccggcggaattttcgcgcacccagtggcttatcaaccacaatcttgcggatgtgaaagccacccagttcattgacgtcctgatgtcctacccgctgaaagcgcgccgcgcgcactgcaatttgttattcgggctggagctggaaaaagtcaacgcggttccggccacggcgtcagcggcaggtaaaatcggcaataaaaacggtaaaaccaccaagccccgcgtcaccgatctgggatcgttcgagctgttcagccagttctttgcgcgcatgaaaaccgccgtgcaggccgatgagttccctactctgcagatcctgacgggcatggataacctggcaaaagcgccacataatttaaagcagggcatcagaacctggtttaaagccatcgcgggcgaccttccaccgaataacaaacgcgttgaagcggggaatgccgttctgttctgcgccccccttcgcgaacagatccagcgtatcgaagcgctggggctggagcattactaccagggattatccaaagccattgccgaagcgggtgatggcttcatctctgactttacctatacttacgagcaataaatacacactttcactcatcacggcatgcaaaacaggaggtttttatgcttatcgttgttcccgtccttattttcgttgcgctggttatcgtgggcgctggcgtcaaaattgtccctcagggttatcagtggacggtcgagcgtttcggccgttacaccaacacgctccagcccggcttaagcctgattgtcccgttcatggacagaatcggccgcaagatcaacatgatggagcaggttctggacattccgtcccaggaagtgatctccaaggataacgccaacgtcaccatcgacgccgtctgttttattcaggtgattgatgcgccgaaagcggcctatgaggtcagcaacctggagctggcgatcgtcaacctgacaatgaccaacatccgtaccgtactcggttcgatggagctggacgagatgctttcccagcgcgacagcattaacacccgcctgttgcacattgtcgatgaggccaccaacccgtgggggatcaaagtcacccgcatcgagatccgcgacgtgcgcccgccggcggagctgattgcctccatgaacgcccagatgaaagctgagcgaaccaaacgcgcctacattctggaagccgaaggggtacgccaggcggagatcctcaaagcggaaggggaaaaacagtcgcagatcctgaaagcggaaggcgaccgtcagtccgcgttcttacaggcggaagcgcgtgaacgttccgccgaagcggaagcccgcgcgacccagatggtgtccgaggcgattgccgccggtgatattcaggccgtgaactacttcgttgcgcaaaaatataccgacgcgctgaaagagatcggctcggcgaacaacagcaaagtggtgatgatgccgctggatgccagcagcctgatgggctctatcgcggggatcgccgaactgatcaaggacagcggaaacgagcgtaaaaaatgattgagctcatcgttgcacatcctcatgccttctggctaagtctcggtggcttattgctggcagcggagatgctgggcggcaacggctacctgctctggagcggtgtggccgccgtcattaccggtcttctggtctggatccttcccctggactgggcgtggcagggagcgctgtttgccgcgctgacgctggtggccgcctggctgtggtggcgctggcttaaccggcgggttaacgagcagaaaccggtggacgcccaccttaaccagcgcggacagcagattgtcggcaagcgttttaccctcgacaccgcgctggtgaacggacgcgggcacatgcgcgtaggcgacagctcgtggccggtggtggccgacgatgacctcagcgccggcacgcgggttgaagtcattgcggtggaaggtattaccctgcgggtaaaagcctgttaagcgtgggttttgcggtggcagcagccggcaagattatcaataatcgggcagtcggcgctgtcatcccccggacaggagtccgcgagctgcagcagctgttcgcgcatcgcctgcagttcgacgatgtggcgttcaatttcggccaccttttccagggtgcgttttttcacgtcggcgctgtgacgcttaggatcgttgaacaggttaaccagctcgccgcactcttccagattaaacccgacctgtcttgcctggcgcagcagcgtcagctcatccagatgcagctgcgtgtagctgcggtagccgttttcactgcgcagcggcggcgttaccagccccttctcttcataaaagcggatcgctttgctggttaagccggttttttttgccacgtcactgatattcacatttcccccttgaccttccccttgatggaaggtttaaccttcataacagttagcgaaaagcgttactccggtcaacaactgaccaatatattatacgggagttttgttatgtctcacactatcgacctgacgctggacggcctctcctgcggccactgcgtcaaacgcgttaaagaaagcctggaacagcgtcctgacgttgaaagcgctgaagtgactatcgaccatgccgccgtgaccggcagcgccagcgcggacgcgctgattgataccattaaacaggccggttacggggcggagttaagccacccaaaggctaaaccgctggcagagtcatcatccccgtcggaagcactgacagcggccactcctgagcttccggcagctgatgatattgatgacagccaacagctgctgatcaacggcatgagctgcgccagctgcgtctcccgggtacaaaacgccctgcaggcggtcccgggcgtcgcgcaggcacgggtgaatcttgcggagcgtactgcgctggtaatgggcagcgcctccgccgcagagttagtgcaggccgttgagaaagcgggctacggcgcggaggccatcgaagatgatgccgaacgccgcgagcgccagcaggaaacggctatcgccaccatgaagcgcttccgctggcaggccatcgttgccctgctggtgggtattccggtgatggtgtggggcatgatgggtgacaacatgatggtcaccgacgacaaccgcacgctgtggctggtgattggtctgattacccttgcggtgatggtgtttgcaggcgggcatttctataccagcgcctggaagagcctgaaaaaccgcaccgcgacgatggatacgctggtcgccctcgggaccggcgcggcgtggctctattccatgagcgtgaacgtctggccccagtggttcccgatggaagcgcggcatctctattatgaagcgagcgcaatgattatcggcctgatcaacttaggccatatgctggaagcccgcgcccgtcagcgttcctcgaaagcgctggaaagattgcttgatttaaccccgccgacggcccgcgtggtcacggacgagggggaaaagagcgttccattggccgaggttcagcccggcatgacgctccgtctgaccaccggcgaccgcgttcccgttgacggcaagataacccagggtgaagcctggctggatgaagcgatgctgaccggggagcctattccccagcagaaatccgacggcgacgccgtgcatgccggtacggtggtgcaggacggcagcgtgctgttcaccgccagcgccgtcggcagccacaccacgctgtcgcgtattatccgcatggtgcgccaggcgcagagcagcaagccggagattggccagcttgctgacaaaatctcggccatttttgtaccggtggtggtcggcattgccctgctgagcgcggcgatctggtacttcttcggccccgcgccgcagattgtgtataccctggtgatcgctaccacggtgctgatcatcgcctgtccttgcgcccttggcctggcgacgccgatgtcgattatctccggcgtagggcgcgcggccgaatttggcgtactggtacgggacgcggacgcgctgcagcgggccagcacgctcgacacgctggtgtttgataaaaccggcacgctgacggaaggtaaaccgcaggtggtcgccgtcacgaccgcaggcattgccgaagaggaggcgctgcgtctcgccgccgcgctggagcaaggctcaagccatccgctggcgcgcgctattctcgataaagccaatgcgtctgccctgccgcaggtgagcaacttccgcaccctgcgcgggctcggcgtgagcggtgaggcagaaggccatgcgctgctgctgggcaaccaggcgctgctcaatgaaaacggtattgataccgccgcgctggaaaacgagctgaaggcgcaggcgtctcagggcgctaccccggttctgctggcggtggacggcaaagctgccgcgctgctggccgtgcgcgatccgcttcgccaggacagcgtggacgccttacagcgcctgcaccgtgcgggctaccgtctggtgatgctgaccggggataacccgaccaccgccaacgccatcgcgaaagaagccggtattgatgaggtgattgcgggcgtactgccggacggcaaagcggacgccattaaaaacctgcaacgccagggccgtcaggtggcaatggtcggcgacggcatcaacgatgccccggcgctggcccaggcggatgtggggatcgcgatgggcggcggcagcgacgtggccatcgaaaccgcggccattacgctgatgcgccacagcctgatgggcgtggccgatgcgctggccatttcgaaagccacgctgcgcaacatgaagcagaacctgctgggggcgtttatctacaactcgctcggtatcccgattgctgccggcattttgtggccgctgaccggcacgctgcttaatccggtggtcgcgggtgcggcgatggcgctctcctccatcaccgtggtcagcaacgccaaccggctgttgcggtttaaaccgaaggattgaaccttgtacccgtacgcgctagcatgaacctttccgtttatggagcgcgtatgggtctgtttcatcgtataaaaacatcgtttcgcgcccttttccctcgccgttacgcctggcccggtctggatatctcgcttcccggcgggcaacacctgcacctggtcggcagtatccatatgggcacgcagggtatgtcacctctgccgcccggtctgataaagcgcctgaagcgcgccgacgcgctggtcgtcgaggcggacatctcgggccatgagtcaccgtttgccgggcttgaaagcgatctcccgctggcggaacgtctgaatgaggcccagctcgcggaactgacgcgcgtcgccgaggaaaccggcgtatcgctctccatgattgacaccctgccgctgtggcaaatcgcaatggtattacaggccacgcaggcccagcgtctggggctgcggggtgattacggcattgattaccagctgctgaacgtggcgcgtgcccgccgtatgccgatcatcgaactggaaggtacggacagccagattgcgcttctgcgacagcttcccgacgacggtctgatgctgctggatgataccctcacccactggcacaccaacgcacgcctgctgcagactatgattggctggtggctggatgcaccgcccgcggacggcaggctggcgctaccgtcgacgttcagtgaatcgctgtatgatgtgctgatgaatgcgcgtaacaaagcctggcgagagacgctgcatgctctgccagcgggggaatacgtggtggcggttggggcgttacatttatacggcgaagggaatttgccgtcgttgctgaaataaaaaaatggccaatatctctattggcccgtcaaagaggaatttcatcgtttttattataccgaagtgaccttcggctgagccgattgtcgctcaaagtgaccatcactgccaacactattgcgcaagatggtgctattttttagacaaacgtcaggcgtatgctggctgcatgaattgtctgtcgtaagaaggatagctatgactcccgccgttaaattactcgaaaaaaacaacatttctttccggatccacacctacgatcacgatccgaatgaaaccaactttggtgatgaagtggtgcgtaagctggggctaaacgcggaccaggtttataaaacgctgctggtggcggtgaatggcgatatgaagcatctcgccgtggcggtgactcccgtggcgggacagctggatcttaagaaagtcgccaaagcgctgggggcgaagaaggtggatatggcggatccgatggtggcgcagcgcaccacgggctacctggtgggcggcatcagcccgctcgggcagaaaaaacgcctgccgacgctgatcgatgccccttcacaggaatttgagaccatctatatttccggcggcaagcgcgggctggatattgagctggccgcgggcgacctggcgaaaatgctggacgcgaagtttgcggatattgcgcgcagggagtaaaaaaagccgggtggcggctacgccttacccggcctacattttgcccccgtaggcccggtaagcgcagcgccaccgggcaacacagccgcactactgccagctcacctcgcctttcggctcatacgcattcacgtcaatcggcgaattctgctcgatatactgcttcagcacttctgcatcgataaagccggtgttcacgtagcccggtttattatcaatatgcggatagccgtcgccgccggtggcgttaaagcttaacgtcgccagacggtaggttttcgccgggtcaaccggttcgcctttgatcttcaggtcgttaagcttgccgtctttcgctacgaagctcacgttggcaaactgcggataggccccggaatccggcttcatctgcgccacggcggtcaggtactcaacaacctctttcccgctcatgtcggcataaaccaccacgttaccgaacggctgcaccttcagaacgtctttataggtgatgtttccaccttcgatggaatcacgaatgccgccgccgctcatcacgccaaaatcagccccggtgcgcgccatttgcgccgccagcaccaggtgccccatgttggtctgcacgaagcgaactttgctgcggtccccttccagacgaccgttcagcgtgccgattttcacgtccagctgcgccttgcctttgttctggaacggcgtcagcagggagagcatctgctggttttctggaatctctggggtgtaaagtacgcgctcgcttttcccgtccgggtaggtgactttcttcttcaggttgaccggaatgagctgatagtgcaccagcttcatctcgccgttacggaactcgaagtccgcccggcctacgtatttcccccactcgtgcgcctgcacaatccagataccgttctgacgatctggcgcacacggcgtgcccggcacgtagtccacctgctttttattctccgacgccatgcagaccggatcctgtgagtgaccacccacaatcatcgccagcgagcccgccggcaggctgcgcgccatttccacgtcaccgggcgcgttagagccgtgctcaccgttgtcgtagtgccccatgtgcgtggtggcgataatcacgtccggcttttcgttttgctgcagctcctgaatcaccagcttcgcttcatctgccggtttgcggaattcgatatcggtaaagaactcaggattgccaattttcgccgtgtcgtcggtggttaagccgatgaccgcgatcttcagatcctgacgcttaaacagcgcccacggcttgaacaggcgttcgccggtgcttttctggtaaatgttggcggagaggaacgggaatttggcccatttttcctgctgacgcaggacgctcagcggattatcaaactcatgattaccgacggccatcgcgtcgtagccaatcaggttcatgccgcggaaatcgggctcggcgtcctgtaaatcggattccggcacgccggtattgatatcgcctcccgacagcagcagcacgctgccgccctgggctgccacctctttacgaataccgtccaccagcgttttttgcgccgacaggccatattcgccgtattcactgcgccagaaatgaccgtggtgatcgttggtatgcagaatggtgattttataggttttgtctttttcatacgcctgcacgggcaggcttaccagcccccacgccgcgatgagcgccagcgcgacgccccgcttcattaacttcatcttctctctccctgaccaatagacaaaggcagaaattacagtgactaataagaatagacaaataagttttcagaattgcgactttcttcaaatgtcccaggcgggtatgttagtcggataataattacaccctgcatcgctaataactcaagacgtggtaattctctctatggcaatcagtgactcaacccagcccgttccgggtgcgccgacgtcgcgcacctcctttaaagtcttaggcgcaatcagtctctcgcacctgctcaacgacatgatccagtcgttgattctggctatttatccgctgctgcagtccgagttttcactcaccttcgtgcagattgggatgatcaccctgaccttccagctggcttcctcgctgctgcagccggtggtgggctactggacggataaatatcctatgccgtggtcgctgcccatcggcatgtgctttaccctaagcgggctggtgctgctggccattgccggaagttttgaagccgtgctgattgccgccgcgctggtaggcaccggctcgtccgttttccatccggagtcttcccgcgtggcgcgtatggcgtccggcggtcgtcatggcctggcgcagtccctgttccaggtaggcggtaactttggcagttccctcggcccgctgttggccgcggttattattgccccttacggtaaaggcaacgtggcgtggtttgtgctggccgcgctgctggcgattatcgtgctggcgcagattagccgctggtatgccgctcagcatcgggtgaataaaggaaaacctaaagcgaaggttatcaaccccctgccgcgcaataaggttatcctcgcggttgccgtcctgctggtgctgattttctcgaaatacttctatatggcgagcatcagcagctattacaccttttatctgatgcaaaaattcggattatcggtacaaaacgcgcagatccacctgtttgccttcctgttcgcggtggccgcagggacggtaattggcgggccggtgggcgataagattggccgtaaatatgtcatttggggctctatcctcggcgtagcgccttttaccctcattttgccgtacgccagccttgaatggacggggattttgaccgtgattattggttttattctcgcctccgcgttttccgccattctggtttatgcccaggagctgctgcctggacgtatcggtatggtttccggactgtttttcggtttcgccttcggcatgggcgggctgggtgcagcggtgttagggatggttgcggatcacaccagcatcttcctggtttataaaatctgcgctttcctgccacttcttggcatgttgaccatattcctgcctgataaccgccataaagcgtgaattacgggtagctaaacttatgctttagctacctgatacccttataccataagggtttcctcttcatccccgcgctgaatttatcaaaatgcgcttttttacgtgcatattgctgttttattcaaacttcaacaattattcataaacataagggtaaaaattgtcataaactattacctggttttttggtattcacgccaaaaatggaacactcaccacgaaaggagacggaatgcaccacgccacaccgcttatcaccaccattgttggtggacttgtgctcgcttttattctcggcatgattgccaataagctgcgtatttctcctcttgtcggctatctgctggcaggtgtgctggcgggaccgtttacgccaggttttgttgcggataccaaactggcccctgagctggcggaattgggcgtgattctgctgatgttcggcgtcggcctgcacttctccctgaaggatttgatggcggtaaagtcgattgccataccgggagcgatcgcccagataggggtggcgacgctgcttgggatggcgctttcggccgtgctgggctggtcgctgatgaccggcatcgtatttgggctgtgtctctcaaccgccagtaccgtggtgctgctgcgcgcgcttgaggagagacagctgatagacagccagcgcgggcagatcgcgataggctggctgattgtggaagatctggtgatggtcctgacgctggtgctgctgcccgccgtcgccggcatgatggaaaaagacaatatcggcttcgcctcgctggcgctggatatgagcatcaccatcgggaaggtggtggcgtttatcgccatcatgatgctggtgggtcgccgtctggtgccgtggatcatgtcccgcagcgcggcgaccggatcccgcgagctgtttaccctctccgtgctggcgctggcgctcggtatcgcctttggcgccgttgagctgtttgacgtctccttcgcgctgggcgcgttctttgccgggatggtgctgaacgaatccgagctgagccaccgcgccgcgcacgatactctgccgctgcgcgacgccttcgccgtgctgttcttcgtctccgtcgggatgctgtttgatccgatggtcctgattcaccagccgctggccgtgctgggcacgctggcgatcatcatctttggtaagtcgctcgccgccttcttcctggtgcggatgtttggccactccccgcggacggcgctgacgattgccgccagcctggcgcagattggcgagttcgcctttattctggccggtctgggcatggccctgaacctgctgccgcaggccggacaaaacctggtgctggcgggggcgatcctgtcaattatgctgaacccggtactgtttgctctgctggaaaaatacctcgataaaaccgaaacgctggaagagcagacgctggaagaggccatcgaagaagagaagcagatcccggtcgatatttgcaatcacgccctgctggtcggctttggccgcgtcggcagcctgcttggtgagaagctgatggcgcagggcattccgctggtggtaattgaaacgtcacgcacccgcgttgacgagctgcgcgagcgcggtattcgtgcggtgctgggcaatgcggcgaacgaagagatcatggagctggcgcatctggactgcgcccgctggctgctgctgaccattcccaacggctatgaggcgggtgagattgtcgcctccgcgcgcgcgaagtgtccaaacattgagattatcgcccgggcgcactacgacgacgaggtggattacattaccgagcgcggtgcggataaggtggtgatgggcgagcgcgagattgcgaatacgatgctgacgctgctggaaaaaccgccggttgaagaggcggtgacgggttaagttttgtgcggcctgatgccctcaccctggccctctccccggaccgtacactcccacagggagagggaacaaacactaaaaacggcaaccacaggttgccgttttgcttttacctgtcccagtacgcctcttcgaggctgtcttcacgttccggcaggccacgcgttaagcgcggtgagtgctggttcagcacctgatagcttacgcggttggcgtacttgcatacctgtgccagcgacgaataggtcagccagctgaacttgtgcttgctggaatttggcacgttggttttgtggtaggcgttagcggtgatgtcgtgcagcagcgcggccagcgcgccgtcgcccgcgccgttggtgttcatgatcttctccggcccgcccatgtaaggggcgatgtgcgagtagatacgcagcggattaacacagtctttaaaacgcatgccgcggctgaactcgtactggttgaactcggcaatcgcgccgggcagcagcgggtgctgggttttgcgtttgctctcttcttcggtgaagccagccatatacagcccaaccggacccgcggtgcagagcaccagatccacccagtccagcgctttgtcagacgccagcagcggatcgctttcaccggtcagcgcttcggcctcctcttcgttcatcgccagaatcgagacgtgctctttcaggaacgcctgccaccattcaggattatcggcaatcacgaatttggtgcccagcgtcagaacgacgggcacgtcgtacttcttcgcgtactcaatcgccttcatggtcgcttccggcatcggctcgcccggcttgcagcgcaccaggtaggaggtcagcaccagcgccgaggcgcccgcgatcacctcttcgggaatgctgtccgcgcgcagcttgttcatatgacccgggctgatggcaaaggtacgctcgccggattcgccgatcagcgtaaagcagcggccaatcggcccgtcgacgccctggagatagttcagatcggtacggctggaggtgttgcacaggtaacggtaggcgtagccaccgatttcgatattgctgcacattacgccgagcaggacagagcggtcgtccgccagcacggagtagttgtgcatggtgttgccgatggtgccaccggcgaactgatgggtaatcaggttttcgcgcaccagctcctggtacagcgcttcggcaacgtcatcttcaatcaccagcgagtgaccggcgctcagaccgtaacgggcgacaaacgcatcatccactttcgcttcaatgtccaccagcgtctggtcgataccgacgacccacgccgcgctggtttcattttctggctggatttgctgcaggagcggatcgcgggcatccacggggaagtagtgtttggatttgcgtttaccgggaaatttcatggtctgaactgtacgaagaatatgggccgggaatggtagcacaaacccggcccggagtgcgatcagcgaccgttcgttaccagcgagaccatcatgtcgatatgctcaggggagtcgttaagcgccggaatgtactcgtacttttcgccgccagcctccaggaaaaattcccggttttgcaccgcgatctcctccagcgtctccagacagtctgccgagaagcccggcgacatcacctgaatgtgcttcacgcccttctcacccagcattttgagggtttcatcggtatacggcgtcagccacggctcgcggccgaagcgcgactggaaggtcatcatcaccttctccggcggcaggccgagggcggaaaccagctcgcgggtggtatcgcggcagcgctgcgggtaatcatccccttcattggcgaaacgctgcgggatgccgtgataggagagcagcagcagatccggctcgccgtgtttttcaaacgacgcgcgcgcgctgttggcgagcgccttgatgtacagctcgttatccgcgtagtcgcgaataaaggtcacgcccggaatgcggcggcgggtcgccagaatgcgcgccagctcgtcccagacggcggccaccgtcgagcaggagtactgcgggtagagcgccagcaccacgatatggtccacgccctgcgccagcagcgagtccaccgcgctttccagtgacggtttgccgtagctcatgccgagcgcgacgggcatatccggcaggcgggcggccagcgccttctcctgacgacggctgtagaccatcagcggcgagccctcttccatccagacggactgatagagtttggcgacgcgcggagaacggatcggcagaatgacgccccgcagcagcggccaccacagcagtcgcggaaaatccacgacgcgcgtgtcgcttaaaaattgtcgcaggtagcgttttaccgcgtctgatgtaggtgcttctggagtgcccagattggcaagcaggatgccggttttcgcctgactcattcacgcctcttaaccatttgaatggttgtcaattgtagcggaaatgcgtttaaacgaaacccattgctgtaataggtaagatgagaatttttctcacccggtggcccgggtgagagagatgcgattagccgaggattttttccagctcagcacgcacgtcagccacggctttggtgccgtcaactttggcgtatttggtgttacccgcctgcgcttctttggtgtagtagccgatcagcggcgcagtcatctgatggtattccaccaggcgcttgcgcacggtctcttcctgatcgtctttacgggtggtcagctcttcgccggtcacgtcgtctttgccttcaaccttaggtgggttgaatttgatgtggtaaacgcggccagaggcagcgtgtacgcgacggccaacgatgcggtcaacgatcagctcgtccggtacgtcgaactccagaacgtagtccacgttgatgcccgcttccttcatggcgtcagcctgaggaatggtacgtgggaagccgtccagcaggaaaccgttacggcagtcttcctgagcaatgcgctctttgaccagagcaattaccagctcgtcggtcaccagcttgcctgcgtccatgatgtctttcgcctgtttacccagctcggagccagatttaacagcggcgcgcagcatatcaccggtggagatttgcggaataccgtatttctccatgatgaactgagcctgagttcctttacccgcgcccggagcgccaagcagaataatacgcattgcgaaaatcccctcaaaagtcgtttcaatttttcaaaagcgctaaacaataccaccagaacgggcatcgctcaaggaaggcaggaaggctgaaacggttaatggggggagataatttgggatagtgcggtctggtgccctcactctggccctctccctcggggagagggagaagaccaggagaggcgtggtcaattacgccaacagcagcgcattcacacgtttaatgaagaggttaggatcttccagcgtgccgcgttcggccagcagggactgatccagcaggagttcaacccactcggcaaagcgggcgtcgtcctgggtatccgccgcgcgtttcaccagcgggtgatccggattaagctcaaagatatatttcacttccggtaccgcctggcccgccgcggcgaacagcttcgccatctgggtgctcatttcgtcggcatcggtggtgacaatggccggagtgtcggtcagacgatgcgtgaagcgcacctctttcacgcggtcgcccagcagggttttcacgcgctcaatgaacggctccagcgccttctcggcttctttcgcattttcatccacttcatctgccagcttgtcgatggactcatcggctttggcaacggactggaacgccttaccgtcgaactcggtcaggtagttcatcatccactcgtcgatgcggtcggaaagcagcagcacttcgatgcctttcttacgcagcagctccaggtgcgggctgctcttcgccgcggcgtagctgtcggcggtgatgtagtagatcttctcctgcccttctttcatgcgggagatgtactcttccagcgacacggtctgcgcggaggagtcggtgtgcgtagaagcaaagcgcagcagtttggcgatggtttcaacgttcgccatgtcttcagccgggccttctttcagcaccagaccgaactgtttccagaaggtctggtatttttccgcatcgtctttcgccagtttttccagcatctgcagcgcacgcttggtcagggcgttgcgcaggttacgggtgacggtgctgtcctgcagaatttcgcgggagacgttcagcggcagatcgttggaatcgatcaggccgcgcacaaagcgcagatagttcggcatgaactgctcggcgtcgtccatgatgaacacgcgctgcacgtacagcttcaggccatgcttgtgatcgcggttccacatgtcccacggcgcctgcgccgggatgtacagcaggctggtgtactcctgcttaccttccacacggttgtggctccaggtcagcgggtcggtaaagtcgtgggcgatgtgcttgtagaattcgttgtactcgtcgtctttaatctcagacttgttgcgcgtccacagcgcctgcgccttgttgattttctcccaggaaaccacggtttcaccgtctttctcttcctgtttttcaatctctaccggcagcgcgatgtgatcggagtacttgctgatgatggagcgcacgcgccagtcgttcaggaaatcatcttccccttcacgcaggtgcagggtgatttcggtgccgcggtccgctttggtgatgtcatcaacggtgtattcgccttcccctttggattcccacagcacgccgttctcggcgctgtcgcctgccgcacgggtgcgcacggtgactttgtccgccacgatgaacgccgagtagaaaccgacgccgaactggccgatcagctggctgtctttcgcctggtcagagcccatggactccaggaacgccttggtgccggatttcgcgatggtcccgaggtggtcgatcacctcgtcgcggttcatcccgatgccgttatcggcgatggtcagggtgcggttctctttattaaacgagacgcgcacgcgcagctcgccgtcgccttcgtacagatccgggttagacagcgcgcggaagcgcagcttgtccgccgcatccgaggcgttggaaatcagctcacgcaggaaaatttctttgttggaatacagggaatggatcatcaggtgcagaagctgttttacttctgactggaaaccacgggtttcttgtcctttcatctatgtcgacctcaacaatgccatttaatggggttttaaaacgttgagggagagatggggatacggggggaaattttcaagcggaggcggcgcgcgcagcctccgtttggtcagaaaataatcttgtgacgtccagccagagagtgcgacagcgtggtgccgtcgaccatctccagctcgccgccgaccggcacgccgtgggcgatgcggctggcgtcaacgccatactgcgagcacagttcggcgatgtagttggcggttgcctccccttccaccgtggggttggtggcgaggatcacctctttgatggtttcagactcgagacgctgttcaaggcggtcaagaccgatatcgtccgggccgatgccgtccagcggggagagatgccccatcagcacgaagtagcgcccggaaaactgcccggtttgttcgatggcgtagatgtccgccggactctccaccacgcaaatctgaccgttttcctgacgacgcgggttcgtacagatgttacacacgtcctgctcggtaaaggtgcggcaatccgcacagtgaccaatttctgacatggcgcgggtcagagcctgcgccaggcgcatcccgccgctgcggtcgcgctgcaatagcgtaaacgccatgcgctgcgccgacttcgggccaacgcccggcaggcagcgcagtgcttccattaactgcgtgagcagcggactggtttgcatcagaacggcatcttgaagccaggcggcagctgcatgccgctggaaacggaggccattttctctttctgggtttcgtcgatacggcgagcggcatcgttaaacgcggctgcaaccagatcttccagcatctctttgtcgtcttcgagcaggctcgggtcgatttccacgcgacggcagttgtgcgcaccgttgatggtcaccttgaccagaccggcaccggactcacccgtgacttccagctgagcgatctcttcctgcatcttctgcattttttcctgcatctgctgagcctgcttcatcaggccacccagaccgccttttccaccaaacataggcttctctcttctttcacgtttaaggattacaaccgtaagtcagactcacgatcaaatggggcgaatactctcttcatccagatcggcgtcgaagaaccggcgcagggtctgaatgttgttatccgcaattatcgcctcgcgcgcctgcgcgagcttctcttcataaatggcctggcgccactccagcggcgttttcactgccggattatcatcttcaatgatagtcaattcaaccggcgcaccctgtaatgtggcgagcgcctcggccagcgccttttgcgcgccaggggaattgaggtgccgctggcccggacgcaggtgcagacgcacctgattgccgtcctgctctttccaggcattcagcgcgacctgctcgaccagcttcggcagctggagtttgctgacctcggcggcccaggcgtcgcgcgcgatggactcttcggcaagcttcgcggccagctccggcgttttttcatgctccagcgcctttttcagcgctttcggcgtggcaacctcttccttcaccgtttcggtaatggtggttgccttccagcggtaagcctcttctttcaccggggctttctgctcgagcgcggacggtgccggacgcgactgtacgcgctccgttaccgaggccagtcgttcaagcgcggcgttgttcaccggccgcgctcttcctggcgctgccggttcactcttttttggtttggttactccctgcgcacgctgcagctggctgcgcgcggcaagcaccgaactggtggcatccgacagcggtacgttctgctgcggtggcggcgtcggctgcggcggcacctgctgcggtgacatcaccgccgtcggcgcaaccggggcgaaagactgtcggggcacgtccggctccggcagcggcatgcgcgggtggaacgccagcgcgcgcagcagcgtcatttcaacgcccatcctcggatccggcgcaaacggtagctctttgcgaccaatcaacagcgtctggtaataaagctgcacgtcggcaggcggcacggtgcgggcaagctcacgcatccgctgttcaatggcggccatatccgcaccaatggcggagggagaaagctgcagcattgccacccggtgcagcaggctgagcatctcaaccagcagcccttcccactcaataccgcgggcagcggccgcgttcaccagcgacatcacgcgttcgccgttagcggcaatcatcgcttcgataagcgacagcgcctgatcgtcatccagcgtgccgagcatggtgctgaccgcctcggtggagagtttgccgtcaccgctggcaatcgcctgatcggtcagactgagcgcatcgcgcaggctgccgtccgccgcgcgggccagcagctgcagggcgcgcggttcgtggacaatgttctcttcatcgagaatgtgctcgagctgcgcgcggatctgctcaacgtccagcgccttcaggtggaactgcaggcagcgcgataaaatcgtgaccggcagcttttgcggatcggtggtcgccagcaggaacttcacgtgcgcgggcggctcttccagcgttttcagcagggcgttgaagctgtggcgggacagcatgtgcacttcatcgatcaggtagaccttgaagcggccgcgcgccggggcgtactggacgttgtccagcaggtcgcgggtatcttcaactttggtgcgcgaagcggcgtcgatctcgatcagatcgacaaaacgcccctgttcgatctcccggcagttatcacacacgccgcacggcgtggcggtgatcccggtttcgcagttgagaccttttgccagcaaacgggcaatagaggtcttaccgacgccgcgggtgccggaaaaaagataggcgtgatggatgcgacctagcgacaagccgttcgccagggccgtcagcacatgttcctgaccgacaacgtcagcaaaggtttgtggtcgccatttacgggctaacacctgataactcatgggcaggctctgcaacgctggaaggtgaatttatggaggggaatgctatcacaacctcacccattgagcgaggttgtgaaaaccgggattagtgacccgggaaaggcaccaggctgtagctggtaatgccctgtttttccaggcgctgttcaccgccgagatcgaacaggttgatgatgaaggccgcgtcggtcacttccccacccagacggcggatcagcttcacggtcgcttcaatggtgccgccggttgccagcagatcgtcaaccaccagcactttgtcgccaggcttgatcgcgtcaacgtggatctccagctgatcggtgccgtactccagctcgtagctttctgcgatggtttcacgcggcagtttgcgcggcttacgcaccggcacaaaacccacgcccattgccagcgcaaccggtgcgccaaacaggaagccacgggcttcggtacctactactttggtgatcccggcgtttttgtaacgctcgaccagcagttcaatgctgagtgcgtacgctttcgggtcttccagcaagctggtgacatcacggaaaagaatgccaggctttgggtagtcctggatgcttttgatgctgtttttcagatattcaagctgctgtgcagttgcggtcatcggtttgtgcctaaatgaaacagtgttactcacagcgcgcaacgagtcggccaaggcaacaattgtttaacctttgaccaggcgcacctgtgctcgaaaacggtcgaatttactggctgcgcgtgataattgcaacagccatgatgaggcttcagtgcttttgttgcttttcatcaaccacggggatccgccacataaagataagcaggcaggagagaatgatcagcagcaggatccgcacccacatcattttcaccagccataatgaaatggcgaaggtggtgaggatcaccgcgatcgcgcgcggcttggcgccaggcggcatggcacggtgtttttgccagtgccgcaggtagccgccaaaccatgagcggtagagcagccagtggtgaaaacgcggcgacgagcgggcgaaacaccaggccgccagcaggataaacggcgtggtcggcagcaggggtaatactacacccagcgtgcccagcactaccgcaagccagccaatgatgattaaaatagtacgctgcataatgcgaatcgttatcaaactgaacggctactttaccactggagagcgccttgaaaacagcactgcttcttgagaggctgcaaaatcagctgatcgctctgcgggcgcaggccacgccgctgatggggcacgccacgctgaagccgcgctttgaccggcagctttttcgtacccgcagcaccgtcattcaggattacctggctgaagcgcagacgaacctcgacgagcttcgccatgcggttgagaatgaacaacaggaacaggtggcgtggcttgcagagcatctcaccgagcagatcaccgcactgcatcgcgaaatcgccgcctggccgctgcgcgcctgggacagcgcctcgccggggctcggcaaatggcagcgcaagcgtcttgagaaccaggagtttgagcgccggctgtttgagatgaagcgtgaacgcgaggtgcgtctgaacaacagcgaaacgctggaagagcagcagctattgatgcgcgagattagcgcgctggaaggacgcatcgtccgctgccgtcaggcgctggatgacattgaacgcgtcatagaacgtttgacccgttaacaggagccacacccatgtcactggaaaatgcacccgatgaggtcaagctggccgtcgatttgattatgctgctggagaatcatgagatccccgccgagacggtgcttaagacgctggagattgtgcggcgggattttgaggggaaacttccccctcaccctgccctctccccagaggggagagggaaaatagattaagccggagtcgggtcatcacccttaatgtcgcgcttcacttccgtatgctcatcacctttctcgttacgcaggtgaacctcaagctggttaaaggcgatattaatatcgttttcacggcacagacgatcgatagagcggttaagctcatccaccgtgtagctgcggtcacgcagttcacgcacgtataaacgcagctcgtgatccagcgtactcggcccaaaggtggtgaagaagaccgccggggccggatcgtgcatcactttcggatgttcagacgccgccttcagcagcacctctttcaccttatccagatccgatccataggccacgcccaggcggatcaccacgcgcgtcaccgtatcggaaagcgaccagttgatcagacgctcggtcacgaacgctttgttcgggatgatcacctctttgcgatcgaagtcggtgatggtggtcgcacgaatgcggatcttgctgaccgttcccgagaacgtgccgatggtgacggtatccccgatacgtaccggacgttcgaacaggatgatcaggccggacacaaagttaccgaagatctcctgcaggccaaaaccaagaccgaccgagagggccgccgccagccactgcagtttatcccacgagacgccaagcgagccaaagaccgtcatcgctccgacaatgatgatgacgtagttgaggatcgtggtaatggcgtaggacgccccctggcgaagattcaaacgtgacaggagcagcacttcgagcaggcctggcaggttgcggatcagcgcccaggccaccaccgacgacaccagcgcaaacagcaggctgcccatggtcacgcttttcatgaccgccgcgccggcttcggttccgttgtattgccagagggtaatactgtcgagataggcgaaaacggtaataagatcggaccagatcgcccagaacatcaccgcaaacagggcgatcatcaccagcatggtgatacgcagcgtctgctggttaacctgctccagcgcgatggtcggctcttcctgcggctcagcgccttcggccccctctttcacctgatgctgacgacgcgcgatggcgcggcgataggcaatgcggcgggccgccacgctcaggccgcgcagtacggtctgatagagcaggttccagacgatcaccagatagaccgtttcaatccagcgcccggacaggcgcagcgtggtatagaagtagcccgtcgccgtcagcaccatcagcgccagcggaatgatcgccaacaccgtcacggtggccagacgaatattgtgggactctttatcacgccagctgtcgcgacacatcggccacatcaggatcgcaatcagcagcaggttcagcaggatgaccagctggcccagcacgtcatccatcagatgcagcggggaaagctcagagacaaccgaccagaagtgcagcggcagcagcgccaggctgatgcgcacgatctgacgacgccagtggctggtcagctgcgctggcatgttgaaatgacgcaccgccacgccgtctttttccagtaccttccagcacaggccaaacaccagccagaacagcgccagttttttactgaacgcccacagcagatcgctgacgttgagctgcatagtgagcagaatcagccccacggccagaataatcaggcacaccggcagggcgcgaataaggtcaatcagaatcgcttttggcgtatggagctggctatcgttgcgcagttgccctacttcggaggccagcttcgcctggtattttttcagccagcccagacgccagcggatgagaccggcaatcagcaacagcggcaaaccggccagaaaagcaatcattaccgcaggccaggctttctcccagtttacggtgatcttcatgctcttaatctgcgttttcagcgtctcagggaaggatttaacccagtcccagtccatcggcttgttgctgtttacccagaaaatctgctgggtcaggatctcctgcagacttttcgagacgctcaccagctgctgctggttgatttgcaggttaatggccatcatcagctggttacccagctgtttattgagctggtccagcagctcgcgacgcatatccacgacctggagcagcgcgtcgtgcacttccgggttcacgtcgctggaatgcccctcttcaattttggcgacaaaggtatcgctctggaaaagggcatcgcgctgctggttgacgtcaaactgctccagacgtaaatccgcaatgcggttggtcatgtcctccagctcgtcggcggacggaagcgtctgctgctgctggtagagaatacgcgacagcaggaggctgcccttcaggaccgcgatctgctctttgatattgcgttccgcctgcagggcgcgatccagccagtttttcaccttgatattttgctgaaccagcgagttgccgttttccgtcgccagtatcaggcgctgactgagctgatggttagcctcaagctcctgttttaccagcgggttggcctgaatacgggcggtttcgtcaggggatacggcctcctgggcggttttttccgtcagggtcaggcgtttgctgttaaccgcctcctgcaatagctgaagctgatgctccagacgattaatgttcgcggtgacgtaatcacgctgtttctgcagagtgtcctgcagcaccgtattcccttccaggcttttacgctgctgttcgatctgcgcattgagcaacgactgctgaaccagcagcaaggtttgctgcgtcgggcgcagcgtgccttcgcccaccgtcgtgccgttcaggcggttgcggatctgctgcagctgctgagacgcggtatacatcgcattttgcacgcgctcgggctgggtttgcagggagacaagctggctgttgtaggtcgcgagatcggactgcgcggtttgcagatcgtcgagcaactgggcgacgcgcgattccagctggcgtaaggagagcgtggcgagcgttttgcgcgtttcgttgtcgttatcaacgtcactcagggcattcagcgactccgtcgctttgcgcatgttttcaggggcctgcgccaccttctgacgaagctgggcggtttcagccttaacgcgttcaattttatccagcgtttccagcgtttccgtcaggtcctgctgcgtcagtttttcctgaggagagagttctttttgtttgttcagcgtgtcgagctgcgactgaacatcagcacgcgtgggaatatcgttgctgttatcggcgcgggcccaggtcagcggcgccgtggcgaagaaaaacagcatcgcaaagagcaatgcaaaaacaggatgttgcgagcgattgatgggcagcatagttgtgaatgatgtcagaagatgaccgaaaatagtccggcgtgaagaatatcacgctcgtcagatgcagaatagcgcgaacgtaagcctctgagataaatcctggaaaggggtcaggccgttagcgaaggcgcgtcgctgcgcagcgtcgggctaagctgtagcatttccagtaaaatcgccacgtagctgcgagcttccgctttaagatcaaacgattgcggtgcaaaaagccagttttccatcagaccagaaatgtagctgcgcatcagaatcgccgcccgacgggtcaacagattggcaggtagcagttttgcctccatacagaggttcaggttgtgctcaatacggtcatagctttccagactgaggcttcgttgcgcctgctgcacgaccgccatctcgcccacgaactcgcatttatgaaaaataatctccatcattaatctgcgacgttcttcaactaccgttgcttcaaggatatatactaatatttctctcaatactgagagtggatcgtctgggaattttgcccgatactcactctcgagatcgctaatgctggactctgaaagctcccagatttcactgaacagatctgatttgtttttaaaatgccagtaagtcgctcctcgcgtcacaccggcggcctgagcaatttgcgccagcgaggttgctgaaacaccttgctgcgagaacaaacgtatcgccacatccagaatatgttgtcgggtttccagcgcttgttgtttagtttttcgtgccataggtgagtgaatttacaggagtcagatttacatacatttgtgaatgtatgtaccatagcatgacgataatataaacgcagcaatgggttttagactcaggacccttgatcaatttgaaatcggacactcgaggtttacatatgaacaaaaacagagggttaacgcctctggcggtcgttctgatgctttcaggcagcttagcgctaacaggatgtgacgacaaaccggctcaacaaggagctcagcaggcgccagaagtaggcgttgtgacgctcaaatctgaacctctacaaatcaccaccgaattacccggccgtacaaatgcttaccgcattgcggaagtgcgtcctcaggttagcggcattatcctgaaacgcaacttcaccgaaggcggtgatgtgcaggccggtgagtctctgtatcagattgatcccgcaacctatcaggcgtcttatgaaagcgcgaaaggcgatctggctaaagcacaggccgcggctaaaattgcccagctgacgctgaaccgctatcaaaaactgctcggtaccaagtacatcagtcagcaggattacgataccgccctggcagatgcccagcaggctaacgccgccgtggtggcagccaaagcggccgtcgaaaccgcgcgcattaacctggcttataccaaagtgacctcgcctatcagcggtcgtattggtaaatcttccgtcacggaaggggctctggtgcagaacggtcagaccactgcgctggcaaccgtgcagcagctcgatccgatctatgttgacgtcacgcagtccagcaatgatttcctgcgcctgaaacaggagctggctaacggcaccctgaaacaggaaaacggcaaagccaaagtggagctgattaccaacgacggtatcaagttcccacaggaagggacgctggaattctctgacgtgacggtcgaccagaccaccggttccatcaccttacgtgcgattttcccgaatcctgacaaaaatctgctgccaggtatgttcgttcgcgcacgtctggaagaaggaacgaatccaaccgcccttctggttccacagcagggtgtgacccgtacgccacgcggcgatgcgagcgcactggttgttggggctgataacaaagtcgaaatgcgcaatatcaccgccacccaggcgattggggataaatggctggtgacggaaggtctgaaagatggcgatcgcgtgattgttactggtttgcaaaaagttcgtcctggcgcgcaggttaaagcacaggaagtgaaatctgacgataaacaacaagcttcggccgctggccagtcagaacaaaccaagtcttaacttaaacaggagccgttaagacatgcctaatttctttatcgatcgccccatatttgcgtgggtgatcgccactatcatcatgctggccgggggacttgcgatcctgaagctgcctgtcgcgcaatatccaacgattgcgccaccggcggtgacaatttccgcaacctacccaggagctgatgcaaaaacggtgcaggacaccgtcactcaggttatcgaacagaacatgaacggtatcgataacctgatgtacatgtcctcaaacagtgactctaccggtacagttcagatcaccctgaccttcgagtcaggtacggatgctgacattgcgcaggttcaggtgcagaacaaactgcagctggcgatgccgctgctgccgcaggaagtacaacagcagggcgtgagcgtcgagaaatcgtccagtagcttcctgatggttgtcggcgttatcaacaccaacggcaccatgacgcaggaggatatttccgactacgtaggcgccaacatgaaggacgccatcagccgtacgtccggtgtgggtgacgtgcagctgttcggttctcagtacgcaatgcgtatctggatggatccgaacaagctgaacaacttccagctgacgccggttgacgtgattaacgccattaaagcgcagaacgcccaggtggcagccggtcagttaggcggtacgccgccggtgaagggccagcagcttaacgcctcgatcatcgcgcaaacccgtctgacctccgcggatgagttcagcaaaattctgctgaaagtgaatcaggacggctcgcaggttcgcctgcgcgacgcggcgaaagtcgagctgggcggtgagaactacgacatcatcgcgaagttcaacggtaaaccggcttccggtctgggtatcaaactggcgacaggcgcgaacgccctggataccgccacggcgatccgtgcagaactgaagaaaatggaaccgtacttcccgtcaggcctgaagatcgtttatccgtacgacaccacgccattcgttaaaatttcgattcacgaagtggttaaaacgctggcagaagcgatcatcctggtgttcctggtcatgtatctgttcctgcaaaacttccgcgcgacgctgatcccaaccatcgccgttccggtcgttctgctggggacctttgctatcctcgcggcctttggcttctcgataaacaccctgacgatgttcgggatggtgcttgccatcggcctgctggtggatgatgccatcgtcgtggtagagaacgtcgagcgcgtgatggcggaagaaggtctgccgccgaaggaagccacccgtaaatcaatgggtcagatccagggcgcgctggtgggtatcgcgatggtactgtctgcggtatttatcccgatggccttcttcggcggctctaccggtgcgatttaccgtcagttctcgatcaccatcgtttccgcgatggcgctgtcggtactggtcgcattgatcctgacgcctgcgctgtgtgccaccatgctgaagccgattcagaaaggcggtcatggcgagcataaagggttcttcggctggtttaaccgcatgtttgataagagcacgcatcactacaccgacagcgtgggcaacatcctgcgcagcaccggtcgttacctgctgctctatatcatcatcgtggcggggatggcgatcctgttcgttcgtctgccaagctcgttcctgccggatgaagaccagggcgtgttcctgacgatggcacagcttcctgcgggtgcgtcgcaagagcgtacccagaaagtgctggacgaagtgacggactactacctcaccaaagagaaagacaacgttgaatccgtgtttgcggttaacggctttggctttgcgggtcgtggtcagaacaccggtatcgccttcgtttctctgaaagactggtctgaacgtccgggcaaagagaacaaggttgaagccattaccggccgtgcgatgggcaccttctcgcagattaaagatgcgatggtgttcgccttcaacctgccggcgattgttgaactgggtaccgcgaccggcttcgacttccagctgattgaccagggcggtctgggtcacgaaaaactgacgcaggcgcgtaaccagctgtttggcgaagtggctaagcaccctgacctgctggtcggcgtgcgtccaaacggcctggaagatacgccgcagtacaaaatcgacatcgaccaggagaaagctcaggcgctgggcgtgtccatcagtgacatcaataccacgctgggcgccgcctggggcggtagctacgttaacgacttcatcgaccgcggtcgcgtgaagaaagtgtacgtgatgtccgaggcgcagtaccgtatgttgccaaacgatatcaacagctggttcgtgcgcggcagcaatggtcagatggtaccgttctcggcattctcaacgtcacgctgggaatacggttcgccgcgtctggaacgctataatggtctgccatcaatggagatcctgggtcaggctgcgccgggccgaagcaccggtgaagccatgaacctgatggaagagctggcgagcaaactgccttcgggtgttggctacgactggaccgggatgtcctatcaggaacgtctgtccggtaaccaggcccctgccctgtacgcgatttcactgatcgtcgtcttcctgtgtctggcagcgctgtatgagagctggtcaattccgttctccgttatgctggtggtaccgctcggggttatcggtgcgctgcttgcggcaacgttccgcggactgaccaacgacgtgtacttccaggtaggcctgctgacaaccattggcttgtcggcgaagaacgcgatacttatcgttgaattcgccaaagatctgatggagaaagaaggcaaaggtcttattgaggcgacgcttgaggctgttcgtatgcgtctgcgcccaatcctgatgacgtcactggcgtttatcctcggcgtactgccgctggttatcagctccggtgcgggctccggtgcgcagaacgcggtcggtacgggcgttatggggggtatgatcaccgcaaccgtactcgctatcttcttcgtaccggtgttcttcgtggtggttcgccgccgcttcagccgtaagaatgaagatgttgaacacgcgcattcggtagaacctcactgataccggtttcacatgataaaaaggccgcattagcggcctttttcattttcagaaaaaatcataaattacgcttattgtgattcaatttattttctgccatcttaattagacatatcataattaactgataacttaatcggtgaattcaggatttttttaatttcatttccccgcttaagctattaggaatattcctaataagaagttctgacaacgtggagttcgaatctgaacttttctcgccatttttgctaagccaatgaaacgtaaggaagcgataaaacagcgcgttaatttggataaaaaaggggtgtccagggtggaacattgcgtacatgctcgcagtctacggttttatttgtaatttttcgtaatagcgcgatgaaatccaggaaggagtggcttatagttaggttatcaggaacacagcactcatgtagctaagtcagttgtatccatcccgacaatgatgttcggtgagtaagaaatcactcagaaggggatgcgctatggacgagtactcgccaaaaaggcatgatatcgcgcagttgaaatttctctgcgaatccttgtaccatgactgccttgccaaccttgatgaaagcaaccatggctgggtaaacgacccaacgtctgccatcaatttacagttgaatgagctgatagagcatatcgcaaccttcgcacttaattataaaattaagtacaatgaagataataagctcattgagcaaattgatgaatacctggacgacacctttatgttgttcagtagttacggcattaacgcccaggatttgcaaaaatggcgtaaatcgggaaaccggctattccgctgtttcgtcaacgtgagcagagctaacccggttagcctttcctgttaaaattattacaattactaaggtgaatttatgtctgataaaccactcacaaaaatcgattatttgatgcgcttacgacgttgtcagtcaattgacaccctcgaacgcgtgattgaaaagaataaatacgagctttctgataatgaactggccgtattttattcagccgctgaccatcgtcttgctgagctgaccatgaataagttgtatgacaaaatccctacttctgtatggaaatttgtccgttaatctttgaagggtgtctgtagagttctacgccacgttctgagttttttacctatcccgttatgttccttgtgcccaggccaggtctccgtgtaaaacgtgttcatcagcaacaatgttgtgacgacagtcacatcggcttttcgggaacgttcccctctcgacctgttccgattaccctgcggtaatcatttccagagaggtttcctatgagcgtagaaaaacagaagatgattgccggtgaacattatcgccccggcgatgagacgttacgggccgaccgactgcgggcccgccatctggtttaccgctataaccacaccgcgcccgatgaaaaaacagaacgccagaacatcctggcggaacttctggggcaaagcgaaggcgcttatatagaaccgagcttccgctgcgactacggatacaatatttatctgggcaaaaacttttacgcgaacttcgactgcgtgatgctggatgtctgccctgttcgcatcggcgataactgcatgctcgcgccgggtgtgcacatttatacggccacccacccgctggatgcagaggaacggaacagcggcgtggagtttgggaaaccggtcaacattgggaataatgtctggattggtggccgggcggtcattaaccctggcgtcacgatcggtgataatgtggtggtggcctccggcgccgtggtgacaaaagacgtcccggctaacgtcgtcgtgggcggcaatccggcaaaaatcatcaaaactttataagagcgcggggagccaactgttatggtcttttagcgcctgactgttacttttttcagcccgatggctcccctaaaattggcagacaccctgtattgtcaactcttatgaaggcaaaaaatgaccgagatacagcgcctgcttaccgccaccatcgacgatcttaacctccgcgaaaagcgcgacaatcgcccgcgctttagcattagctttattcgcaaacatcctggactgtttgtcgccatgtatgccgcctggctggcgacgctgattgtgatgctgaagtccgaaacgctggtggactccgtctggctgctggttgtgctgtttgtggtctttaacgcctttttctttttcgacgtgaatccgcgctaccgttacgaagatatcgacgttctcgatttccgggtctgctacaacggtgaatggtataacacacgtttcgtgcccacggagctgatcgacagcatcatgcactctccggccgttgaaacagcgcaaaaagagaagctgcagaaaatggtctccaccaaaggccagctctctttctatgatgtctttaccctttcgcgccctgctgctgcgtaattaacgcctgcagacgccggatccccggcgcaaactgcgaagcagaggtgttgccgtaacctaaaaccagaccggtttgcccctgcttcgcctccaggtaatacccgctcagtgcagcgggtgccagctgaaacgccctcgcctgcgccaccagcgtctggtcgtcaatatcgtctatcgccagcgtcagatgcatcccgccttcaccggccagtatacggtgcggcgtgtgaagctctgcccccagcacctcccgcagctggcggtatcgcttacgatagagccgacgcatggcggcaagatgacgggcatagtggccttcttcaatgaacagcgccagcgtacgctgttcggcacgatgcccgccccgcaacagcgagccgatggccgggcgagccgctttcgccagcgctggcggcaagaccatgaaccccattctgagcgacggaaacagcgttttactgaatgttcccagataaaccacgggcgcgttgttgaccatccccagcatcgccggaacaggctcaccggcataacggaattcgctgtcgtaatcgtcttctatgatccacgcgttctgctgccgggccagttccagcagcgccagacgtcgccgggcactgagcacgcttccgtaggggaactggtgcgaaggtgaggtaaaaatcagcgagggagcaggcgcatcccgtccttcccagcacattccctcgtcatcaacagggattcccgtcatggtcaggcctgttttaacaaacgcgctctttgccccgctatagccggggttttccacccacccgacatcgccaggctcactcaacagcatggtgcacaggttaaccccctcaagcgccccttccgttatcactatctggctggcgtcgcagtcgataccgcgggacagggcgaggtgtcgggcaatcgctgcccgcagcgacggttcaccggccgggtcgccataccctagcagggcacttccctcctcgcgcatcacgcgatcgtacaatcgccgccacagcggtagcggaaaatagttgatagccggggttcccggggtaaacgccagcaccggcgtgtcccggggcacgggcgctggcagcaggccgacccgccgggcgagcctgatggcagggtccggcaatgtccgggcgacagagcggtgagcgagctgtgccacccgcgttccctggcggttacgctgcaaatacccttccagcgtgagctggtccagcgccgcattgacggtattgcgggaaagggagagctgctgagccagcgttcgcgaaccgggaagctggctgccggacagtagccttccgcacagtatggcctcccgtaacgcaagataaagcgcgcgctggcgcgtctctttcccacgtttttgcagggcagcattgagcaaggtataaaattcatcacccggtatattcatctcacctcctcgtggcaccatcaaaacatagcgcagtggttctttttaaggaaccagcaattcactagtctggaactcttttcaacgtcacggaaattaagatgaagacattcaatcagttcggacagccagtaggcgaagcgcttagcaactggcagcctcgtcagcacccgtcccgggtcgtgcttcagggacgctattgtcggcttgaaccgctgcgcgtggagcatgccaacgcgctgttttccgcctattccctcgctgaagatacgcgcagctggacgtggctgctgcgtgaacccgacgctaccgcagaggaatttgccgaatgggtggcgaacgtaagcgagttatccgaccccatacactttaccgttatcgataaccagacccggtctccggtcgggacgctgtccctgatgcggatcgatcctaaaaacggggtcgtggaggtggggcacgttcacttctctcccctgttaagccgcacgcccatgtcgacagaggcgcaatatctgctgatgcggtatgtgttcgataccctgggctaccggcgttatgagtggaagtgcaatagcctgaacgaaccttcccgcaaagcggcactgcgtctgggttttcagtttgaggggcgttttcgtcaggcgctggtcataaaaggtcataaccgggataccgactggttttcgattctcgacaaagagtggtcggcgctggcaaacgcctttgaaagctggcttgccaccgacaattttactgccgatggcaaacagaaaagatccctggaaagctggcgagaagcgcgcgtttagcgtctttttttacggccctgcaccgccttaaagcgcggattggatttgcaaatcacgtacaggcgtcccttgcgtttgactatctggcaatccgggtgacgctgttttgcactgcgcaatgagttaagtacctgcatggttagccccgcttcgcattgagaaaaccgccaaaacgcttgcggaagcgcgctgcgctgccgtccgtggagaacgttttctgcttaccggtataaaacgggtgcgattttgaagaaacctcgatggtgatgtatggatacgtttcaccgtcgagttcaatttcgcggtcggtcttaatggttgagccgactttgaagtattcattcgcgctggtgtcgtggaataccaccgtgcgatacgctggatggatgtttggtttcatcgcaaatcccttatgttttgttataacataacaaaataatatccaggccaggttaaaaaaacaaccccttccttctgacgatattttctggtttacctgagataaaatgaaaaccacgccacccacgtgctataactatatcatttcgcggtaaaatctttctcttcaggcagggaactcagtgctcaggaacgggtatacgaggaaggaaacgacagcatgaaaacccgacatctggtcagtctggtgactggcatacttatcttttccgtgctggtccccatttgcctgagcatctggctggctcatcgtcaggcggaagataaatttgtcgatgcgctggataactatgcctcacgcgtgctgatacgaaccgacaaggtcgtgactcaggcgaaggaagcgctcaatcatctgcaggcctttgagggtgtgccgtgcagccccctgcagttaagggagatgcgacgggtcgctttctcgtggcgatatgtgcaggaagtgatttatatcgacaacctcaggccactctgctcctctcttgaacaaaccagccatgccgcccctttccccccgccgatgcgcgttaccgaagatggttacagcgcatggctgaccacgcaaaacgatctggggtttcatcgctacatggccgtactggggcaaggtcactatcttgttctggtcgatccggcctcgcttgtggatgtgatccccttcggcgagatagcgattgatgctgccctggtaggaaataccacacgccgcatctttgccagcagcaatacgctcgatccgcatatccgtgacatgatcatgggtcaggagatgaccagcatacagtacgacggttcaatgtacgttatgaagcccgtccctgaactggggtttaccgtcgttgcatgggctacgctcaaaccgctggctgaaacatggcaccggcagctgcttttgtggctgcccttcggcatcctgataagcctgcttgccgcgctctttgtcctgcggatactgcgtcgcatccagtcgccgcgcaaccgcctgctcgacgccattaacagccgcgattttgtggttcactatcagcccatcgtggcgctgtgtagcggaaaaattgtcggcgcagaggcgctgacgcgctggccgcagccggacggaagcagcctctcgcctgatatttttatccctcttgctgaacaaaccgggcttgtctcccagctgacgcagctcgttatcgaaaaggtgttcgaggatatgggcagctggctgcatcttcaccccgatcagcatatctccatcaacctcgcgcccgccgatttgacctccggcacgctgccgccgctgctgagtcacttgctgaacaaatggaaggtccacccaggccaaatcgcccttgaggttaccgagcgcggctttgccgatcccaaaatcagcgcgccggctatcgccgcattccgccgttcggggcaccctgtctatattgatgattttggtacgggctattccagcctgagctatctgcaggatctggatgtcgacacgctaaaaattgataaatcgttcgtggatgcgctggagtataaaaacgtgacgccgcacattattgaaatggcgaagtcgctgaagctggcaatggtggcggagggcgtcgagaccgccgggcagctcgcctggctgcaccagcacggcgtgcagtacggacagggctggtattacagcaaagcgctaccaaagacggaatttattctttgggcagagaataacctcggcacgcacgctacttaaggtaggatttcatcacctgcagcactacgccaagatcggcttcacgctgcgcctcttcgggctctttcaccacgtgatcggtaaggtgcccttcaatcacctgcatcatcatgccgttgaccgctccacggatcgccgccagctgctgtaacacctcggcgcattcgtgttcgctgttgagcattttttcgagcgcggtgctctgcccctgaattttcttcaggcgagtcagtaacatcttcttgtcgcgaacggtatgtgacatctctgtctccctcagttttggcttttagagcatatcacgctctactctccctgagtatttttctactggggggtagtattaagctactgggggggagtactatttgcgcacgcttccatttcggaaatttcaatgaacgatttcgcctcactcctgcagcagggtaatgcctggctgtttgttcccagcgctatcctgctcggtgcactacatggcctagagccgggtcactcaaaaaccatgatggccgcctttatcgtggctatccgcggcacgctgaaacaggcggtcctgctcggcctggccgctacgctttcacatacggcagtagtctggattatcgccatggcgggtttatggtttgggcggggatgggatgcgcatacgtctgaaccctggttccagctgatctcaggggtattgatcgttgcgatcgccctgtggatggcgtggcgaacctggaaagagagccagccacacgatcatcatcacgaccatgatcatcaccaccaccatgaccatgaccatcatcatgaacatcaccaccacgaacacccgctggttgaagcagagtggcaggatgcccaccagcgcgcgcatgcgcaggatattaaccggcgcttcagcggccaaaacgtcaccaccggacagatcgtaatgtttggcctgaccggcgggcttatcccctgcccggcgtccattaccgttctgctgatctgcctgcagctgaagcatttcgccctcggcgcaacgctggtgttcagctttagcattggtctggcgttaacgcttgtcgcttccggcgcgattgccgccttgagcctcaagcacgcgaccaaacgctggcccgggtttagcgaattctcccgtaaagcaccgtggatctccgctgcgctgattaccgtggtagggatttatatgagcctgcatggcctgagcggcattctggcgtaagcctgcggccacactctgtggccgcatctccagggtcagttaagggttctgctgccagctgaaggtatagcgaagctggcgtgtctgcaggaggaattccggcgagacgctggggctccaggagtcgtcgccgcccacgcccatatggaacgcatcgagattgagccagcatcccggctcttcgcgcagcagatggtgatgggttgtctcccgcagctgctgctggccgtagcggctcaccgagaaatggaaccggccgttcagctgatgcgttcccagcgccagctcccgcgtatcacagcgcaaaccattttccgtcgggaagatatacggcgtgtgcatctccgccaggggtaatgtccagcgcccctgctgcgccgccagcgttctgtccgggtagttttcatgcggccccagccccagccaggacacgttttccggcgtttcggcaagatgaacgctcaggccaacgcgcgcgggttccgggagatcagacgcaatatccacctgaatatcgccgtggagtactccccgatcgtccacccgccaggttttacggctcagaaacagcgcgttgccgcgatattcaaggacgtgcagggttgtgaccaccacctcgtctgcgtgctgctctgcctcacagtgcagcacgcgcggggtaagatcgtacatgcccgccgctttccagcgctcaacccaggcattcggatcgatcttcgtcgcttcactcaccccaatatcattgtccagcggcgcacggctgacgttatccgtcagaggcgacatcagcgtttccacgccatttcgccaccattgagccaggtttccggttgcgcgatcgaattgccagcgctgttgaccatgcgcgatcgccaggatgcggtcgttttgcgttaaaaccggcggctcgcccgcagaggctggcggtgcgacaaacagcggagacggaagcagccactgctcccacgcgcagcgatggtcagccggtgaccacggcgttgcccgcggctggcgcacttcaacattcagccagacttcccccggctcggctttcaattccggcagagcgatctccagacgctgaacgccttcaggggctaccgccagcgtcacctcgcccgaagccagtaccttcccatcccgggcaaccgtccagctcagcacttcgttatcggtatggcggaacaggtacccgctttgcacctcaatcaccagcggagaggtgctgacccgcgtaaaggtgaagaactgctgcgcgcgctgcgcctcgaacagcgccgggtgcggcgtgcgatcggggaagaccaggccgttaaggcagaactgccgatcgtttggcttatcgccaaagtccccgccgtacgcccagaacgcgttgccattttcgtctttcttcgttaatgcctgatcgacccagtcccagacaaatcccccctgcaggcgaggatggctgcgaaacgcctgccagtatttcgcgaatccgccgaagctgtttcccatcgcgtgggcgtattcgcagaggatcagcggacgcgtttcatccggcatgccgatccatttcttgattgaccatttaggcaccgccgggaagggttgatcctgatcgacccgggcatacatcggacagacaatatcggtcgccgccgtgttcgcgccgccgccttcatactgcaccggacgcgtcggatccgtggatttcacccagcggtacagtgcgtcgtggtttgcgccgtgcccggactcattgcccagcgaccagatgataattgagggatgatgacgatcgcgctgcaccatgcgggtcacgcgctcgctcatggcgggcagccagcgcggatcgtcagcaaggcggctcatcggcaccatgccatgggtttcgatattggcctcgtcaacgacgtacagtccgtagcgatcgcaaagccggtaccacagcggatggttcgggtagtgcgagcagcgcacggcgttgaagttgtgctgcttcatgatctcgatatcgcgacgcatcgtcgcttcgtccatcacctggccgttttccgggtgatgctcgtgccggttaaccccacggatcagcagcggtttaccgttgagcttcagcaggccgttgctgatttcaatccggcggaagccgacatcgcaggcctccgtctccagcacgttgccctgcgcatccaaaagcgcgatcgtcagacgatagagttccggggtttctgcactccataacgccggggctgtaaccgggatcgccgccgttaaccgctcggcccagttgccgcgctcgtccacaatggcagatccgggccgttgggtagtactgccacaccgctcgccgttgcgccacagcgtgatcgccacctcgcattccgggtagtcagtgcctgccagcgcgacgtcgactttcagcaccgcgcggtccagctccgcattcagatcggtgaccacgtgataatccgcaatgtgcgtctccggcttatgcagcagggagacatcgcggaaaatgccgctcatgcgccacatgtcctgatcttccagatagctgccgtcgcaccagcgcaagaccatgaccgccaggcggttctgcccggggcgtaatgccgccgagaggtcaaactcggcgggcaatcgactgtcctgggaatagcctatccactgcccgttgcaccacagatggaacaccgagttcacgccatcaaaaataattcgggtttgcccgcgctgaagccaggcgtcatccacgtcaaatgtgagcgagtaacaacctgtcgggttgtcctgcggcacaaaaggcgggttaacgggaatgggataggtgacattggtatagatgggcgtgtcgaacccctgcatctgccagttcgacggcacaggcatcgcgacggcatccgcgccatcttcagtaacccatgcctcaggaacccgctcgggagcagaaaagtagctaaatcgccacatcccgttaagagagcgcctgctgatagatccagcgtcatccctggcggaagattcattacgccagctgtgcaacggcgcgtgtgcgggcaggcggttccactgggtgacgccgggattttcccagtcccgacgggccaggatgtcgctgagggtcagcgaggatgtgttggacatagtaacctctttgcgaagcgctcacaattttggttaacatgccctggcattctgcgacggtaaagcattcaatcgcaggctagcgagtccgatcacaaaagtcttatttgcggacaagctgctcggccaggagagccaggcttctgagctgctgcgccagatcctcgcgttcggcctgctgcggcgcgcggcgcgcgctggaatggcgggtaaccagcgtcaccggcagctgaacctgccagcacgtctcgccttcggtgggcgccagcagccactccacgctgcgctcgcccgcctcgcgaaatgcctggagaatggtcgtcagcggcggggaaaaccaggcgctgtcagccgtatcgtcgaacccgaccaccgacatctggcctggaatcgcgatccccttttccgcgcaggcgcgcattaccccgagcgccatttgatcgttcgccaccagaatggcatccggcaatgcggtacccgacagcaacacatgtcctttctcataaccgctggccgcgctccagtctccgtaggccaccgcagcggcttcatgccccgcgcgggccagagcggctttccatcccgccagacgcgcccgagcagagaccgagctttccggcccgctcagcagggcaatgcgctgatgccccagcgacagcaggtgctcaacgcccagatgcgccccctgtacggcgttaaacacaagactgtttacctgtgctgaaggcgagacatcaagaaaaagcaccggaacgggcgacgccagcgccctcagctgttcggcgtgttcatcatcaagcggaacattcaccagcagcgcgtccacccgctgtgccagcagcgcctgaagcgcggcctgacactgctgcggttgctccaccatggagataaggacgctcgccccctgttccgccgcgcgggattttaccgccgacacaatttgcgagggcgcatgcagggccagatcggtggtgatgagtcccagcgtgcgggtgcgtttacccgccagctgctgtgcccgcaggttaggcacgtagtgcagctccgccatcgcctgctgaaccttttcccgggtacgggcagacacatgctccgcgtcgttaatgacgcgagagacggtctgataagaaacccccgcaaggagggcgacatcatagagagtgatagctttcatgcattgtggcatcgcgtgagtcggggcccattattgtggcacagcgacgccgttaaaacatgtgagcgcttcgcaaaattaaacaacccgctccggctgcgcgatttcagcaacccgcggcttctggcggaaccagggcagacagagctggataagtgggccaatggtcagggcgtatactaccgttcccaccccaaacgtgccgccaagcacgcacccaatcagcaggacggacacctcaatggaggtacgcacgctgcgaatggaccatcccagccgggcatgaatgccggtcatcaggccgtcgcgcgggccaggcccaaaaccggcgccgatgtacatgctggtcgcaattgcgttcatcacgatacccgacaccaggaaagcgatgcgcacaggtaacgagtccagttccgggataagcgccatgctggcatccgccgccagaccgatacaaatcacgttgctgatggtgcccaggcccggcatctggcgcagggggatccacagcagcagcaccgcagcaccggttaaaatgatcaccgttccgatagtcatccccagctgtatccccaccccaaggtgaaaaacatcccagggatcgacacccaaatcggaacgaataaacatcgcggtggacaggccatacagtcctaaaccgacatagagttgtagcagacgacgtaccatttttatcttctccagtgaaccaggctttcatcctggcctaaaatggcactatgattaatgtccagttttcaaatagtggactgcatatgtcgtcacgtcgcttcggaagccagtcgctggtacgccttttaggccactggcagcaaacctcatcccgcacgccgctctggcggcagctggccaatgcgctgcgcctgttaatccttgacggacgtctggcattgaatacacggctaccgggggagcgcgagctggccacggcgctggacgtgagccggaccaccatcagcagcgccctcgcccatctgcgcgaggagggatatcttgaaagccgccacggtagcgggtcacgcgtgatcctcccggatacgcgcgccgttcccacgctttccgcggcgagtgccgcactggatctctctactgccgccctcaatgccgggccggaaatccaccaggcgtatacccacgcgctcacggccattacgcagcacctcgcgctgacgggttacgatcagctagggctcccgacgctgcgggaggccatcgctgcgcgctacaccgcgcggggccttcccacccgcgcggacaaagtgatggtggtcaatggcgccgtcagcggcttcgcgctggtcctgcggatgatgaccgggccgggagatcgcgtcgtggtcgatcaccccacctatccgctggcgattgccgccattcagggcgcgcagtgtcggcccgtgggggtgtcgctgccggaaacgggctgggatacggacggcttcgccgccacgcttgcccagaccgcgccgcgcctggcgtacctgatgcctgattttcataaccccaccgggcgctgcatggatgtcgcgacccgtcaggccattaccgatattgctgcgcaaacccgtacgacgctggtggtagatgaaacgatggtggatctctggtttgacgcccctcctccgcccccgctggcctcctttaacccgcaggccaccgtcatcaccttaggttctgccggaaaaagcttctggggcgggctgcgtctcggctggatccgcgcgtcctcgcgcacgatcgccacgcttgcccagacgcgcgatacgctggatttaggctcgccgctgctggaacagctggcggcgctgtggctcatcaacaacagcgagacgtttctacccgcacgccgcaaaatgctggcggaacgacgcgatcgatgcggtgaactgctgcgtgaacatttcccggagtggacattccatgaagcagagggcgggctctcatactggattgagctccccggcatgctggcgacgcagcttgccgcgcgggctgagattctggtgataaatctggggaccggtacgcggtttggtttatcgggtgcgtttgaccgctatttgcggatgcccttctcgctcgagccgacagagcttgaacaggcgctgctgaggattaaaccgttatggctcgccctgaataaaaacgtgccagccgttaaacgcagcgtgatttaatagcaaaaagtttgaagccgatcataaaaaataaaaactgctgactgtcatggatacagtcagcagttttcaccagtccggaattaatgctgagcaggaataggaaaccctttcagtgaaataacgaagttttcaccgtctttctttatttttgcgccagtatcacaccagtcagacgcaatacgaaagaactcatcacttccgacattccagccaagacgtacatgcttcacgtagcctgaacgcaacaaatcgcaggcctctttgtagtcactggcagttgacagttgttgtttcattttctcttcttcagaagtttacgtagagccttgatttctttaggagtaaatggagaaacattctcttcttccgtatgctgattatcaatatcctcttccgatactcccgcctcttctactgcctcgaacgccagcagcagcagtttctctgtcgtcacgcttaaattctcgttattcacttccgcatagtggcgaagcctttcttttagcgcgtcatcaatcttaacgtttaataccgctgtagccatgtttatcacttcccttcggaataagtactttatttaatacacgaagttaacaatgttatccagatatatatttttttgagttttgccagaaaatagacggccaaggataaaatgcccgactattattacaagtttatgacattaatatttcagcgcgatgaaatatatattacatgctataggcataatcttattagggaataacgtccagggaagaggcaaaaatcagggaagaacgcagaggctcagaaatgggtgggggccctgccaatggtgccagcgttatgaatggcaacacctacttcagcattaagacctgatttgcctttaataagaccggtagcggtattggaaatactgacagcagatgagtttttactgacgaaaacaccattttcagccgcagtaatatttcctttgttaatcaggtccccttgcatggtatcaatattaacacctgttgctgaagtagaggaaattgtcgccccttcctcgttattcactactaaacgttgtgctccagtgctaatatcaagtccattcccgtaaccagaaatatttcccatattttcaacgtttgaaacatcaatcccattgaccgacacggcagcttcattcccggaagaggttatcgtaacgtctttattaatgacgtattcagcgtcggtggagaagttttgtggaattgaggttgattggtcaatcgtgctggcaaaagcgacggcgggggtgaataacaatagggcaggaaagagacttcccagagttttagtcgttttattgagtctgaaatgtttgttgctcatttacacatccatttgaattagaaaggcgcgatacgacgtattaaaatcacgtcagtatgcggagaaaaagaatgagctcgctacaaagagcgtaaaattattattttttcaatgtcttatgtatagatcgatttattaaataattattttagattttcttaaaatatctcattcctatatggattgaagtgagatattcacatcctggattttttggagaggaaaaatcgtccaacgaatgatgattaccaatagctgcgctttccttttcatggctgctgcgcccctttcaccgggcgggttaactgtctacactcactgctacaagaagagaagaagacaggccatttgatgatactcataatttatgcgcacccctatccgcagcactcgcatgcgaataagcggatgcttgagcaggtaaggacgcttgaaaacgtcgagatacgttccctctatcaactctatcccgatttcaacatcgatattgccgccgaacaggaggcgctctcccgtgccgatctgatcgtctggcagcaccccatgcagtggtacagcacgcccccgctcctgaaattgtggattgataaagtcttctcccacggctgggcgtatggccacaatggccatgcgctaaaagggaaaagcctgatgtgggcggtcaccacggggggaggggaaagccactttgatattggttccttcccggggtttgaggttctggcacagccgctgcaggcgaccgcactttattgcgggctgaactggctcccgccttttgcgatgcactgcacctttgtctgcgacgatgaaacgctgcaggcgcaggcgcgccattataaacaacgcttacttgagtggcaggaggcgcaccatggatagccatacgctgatacaggcgctgatatacctcggcgcggcggcgctgattgtgcccgtggcggttcgcctgggactgggctctgttctcggctatctgattgcgggctgcgtcattgggccgtggggctttcgactggtgacggatgcagaggcaatcctccatttcgctgaaatcggcgttgtgctgatgctctttgtgattggtctggaactcgatccgcagcgcctgtggaagcttcgcgcctcggtgtttggcggcggggcgctgcagatggtggcctgcggcctgctgctgggtgggttctgcatcctgctgggcatggactggaaagtggcagagcttatcggcatgacgctggcgctctcctcgaccgccattgccatgcaggccatgaacgagcgcaatctgacggtctcccagatgggacgcagcgcgttctcggtgctgctgttccaggacattgccgctatcccgctggtggcgatgatcccactgctggcggccagcggttccgccacgacgctgggggcgtttgcgctgtcggcattaaaagtggtgggggcgctggcgctggtggtactgcttggtcgctacgtcacccgtccactgctgcggttcgttgcccgctcgggccttcgcgaagtgttcagcgccgtggcgctcttcctggtgtttggctttggtttgctgctggaggaagccgggctgtcgatggcgatgggggccttcctggcgggcgttctgctggcgagttccgaataccgtcacgcgctggaaagcgatatcgagccgtttaaaggcttgctgctggggctgtttttcatcggcgtggggatgtccgtcgacttcggcacgctggtgacgcacccgctgcggatcgtcatcctgctggttggcttcctgatcattaaaatggcgatgctgtggctgattgcgcgtccgctgaaggtgccgaataagcagcgcagctggtttgcggttctgctggggcaggggagcgaatttgcgtttgtggtctttggcgcagcacagatggcaaacgtcctcgacccagaatgggcgaaagcgctgacgctcgcggtcgcgctgtcgatggccgcgacgcctattctgctggtggtgctgacgcgtctggaaaaatcgggtagcgagcaggagcgcgaagccgatgaaattgacgaagagcagccgcgcgtcattattgccggatttggccgctacgggcagatcgttggccgtctgctgctgtccagcggagtgaaaatggttatcctcgatcacgaccccgaccatgtcgataccctgcgaaaatttgatatgaaggtgttttacggcgacgcgacccgcgtcgatctgctggaatctgccggggcggcaaacgcggaggtgttgattaacgccattgacgatccggagaccagcctgcagatggtggaaatggcgaaagaacatttcccgaatctgaccatcatttcccgcgcccgcgatgtggatcactatatccggctgcggcaggcgggggtagaagcaccggagcgtgaaacctttgaaggtgcgctgaaatctggccgcatggcgctggaaaatctggggctcggcgcgtacgaagcgcgcgagcgtgcggacctgttccgtcgctttaatactgagatggtggaagagatggcggcgatggccgggagtacggccaccgagcgtgcggcggtgtttaaacgcaccagcgcgatgctgacggaaatcattaacgaggaccgtaatcacctgtcgctgatccagcgtcacggctggcagggaacggaagagggcaagcataccggggatccggctgacgaaccggagagtaaaccttccgcgtgaagtggagttgccagcaataataaaaaatttctttatctttaccctgccgccagtcgacgaaagattaagctttccgtatagtggcggcaattttttgcatccgggaaattttcaatgatcagtctgattgcagcgctggcggtggaccgcgttatcggtatggaaaatgccatgccgtggaacctgcctgccgatctcgcatggtttaaacgtactacgttaaacaagccggtagtgatgggccgcctgacctgggagtcgattggtcgtccattgccgggtcgtaaaaatatcgttatcagcagccagccgggcactgacgatcgcgtcgaatgggtaaaatcagtcgacgaggcgattgctgcatgcggcaatgccgaagagatcatggtgattggcggcgggcgcgtgtacgagcagttcctgccaaaagcgcagaagctgtatctgacccacattgatgcggaagtggaaggggatacccatttccctgactacgatccggacgagtgggaatcggtgttcagtgaattccacgacgcggatgcacagaactcccacagctactgcttcgagattctggaacgtcgttaagtgattttttccctctcccggccgggagagggaagtgcatatcaggaggcaaccgcctcgtctccccctaaatccagctgtcggttggacggctgaacaaagtaagttttatcttcccagcgtaagcaggttaactctccgccccagcagcatccggtatccaggccgtagatcccttctggcgttccttttccttccagtgcagcccagtgaccaaataccacgttgtactcgctggtcaccggccccggaatggcaaaccacggtttgagcggagcgggcgcgctctccggcgtctctttggaatacatgtccagctgtccgttcgggaagcagaaacgcatgcgggtgaaagcgttggtaataaagcgcagacgcgccagaccgctgagat
